(19) United States
(12) Patent Application Publication
(10) Pub. No.: US 2024/0175006 A1
(43) Pub. Date: May 30, 2024

(54) COMPACT PROMOTERS FOR GENE EDITING

(71) Applicant: HUNTERIAN MEDICINE LLC, Cambridge, MA (US)

(72) Inventor: Vinod Jaskula-Ranga, Cambridge, MA (US)

(21) Appl. No.: 18/285,370

(22) PCT Filed: Mar. 31, 2022
(86) PCT No.: PCT/US22/22923

§ 371 Date: Oct. 2, 2023

Related U.S. Application Data
(60) Provisional application No. 63/168,769, filed on Mar. 31, 2021.

(51) Int. Cl. C12N 15/10; C12N 9/22; C12N 15/11; C12N 15/86

(52) U.S. Cl. CPC C12N 15/1024; C12N 9/22; C12N 15/111; C12N 15/86; C12N 2750/14143; C12N 2800/22; C12N 2830/15; C12N 2830/42

(57) ABSTRACT

The invention relates generally to compact promoters and their use in gene editing e.g., for treating disease. The disclosure is based, in part, upon the discovery of compact, bidirectional promoters that can be used to express both a nuclease (e.g., a Cas9 nuclease) and a guide RNA (gRNA). For example, in certain embodiments disclosed herein, a compact, bidirectional promoter can comprise at least one regulatory element that directs expression of a gRNA in one direction and at least one regulatory element that directs expression of a nuclease in the other direction. Accordingly, the promoters disclosed herein use less space than prior art promoters, allowing both a nuclease and a gRNA to be packaged in a single vector (e.g., a plasmid or an AAV).

### CROSS-REFERENCE TO RELATED APPLICATIONS

[0001] This application claims the benefit of and priority to U.S. Provisional Application No. 63/168,769, filed Mar. 31, 2021, the entire contents of which are incorporated by reference herein.

### FIELD OF THE INVENTION

[0002] The invention relates generally to compact promoters and their use in expressing gene editing systems, e.g., for treating disease.

### BACKGROUND

[0003] The development of CRISPR/Cas9 technology has revolutionized the field of gene editing. The CRISPR/Cas9 system is composed of a guide RNA (gRNA) that targets the Cas9 nuclease to sequence-specific DNA. Generating constructs for the CRISPR/Cas9 system is simple and fast, and targets can be multiplexed. Cleavage by the CRISPR system requires complementary base pairing of the gRNA to a 20-nucleotide DNA sequence and the requisite protospacer-adjacent motif (PAM), a short nucleotide motif found 3′ to the target site.

[0004] For in vivo gene targeting, the required CRISPR/Cas9 effector molecules are delivered to target cells by administration of appropriately engineered vectors, such as AAV vectors. For example, serotype 5 vector (AAV5) has been shown to be very efficient at transducing both nonhuman primate (Mancuso et al. (2009) NATURE 461, 784-787) and canine (Beltran et al. (2012) PROCEEDINGS OF THE NATIONAL ACADEMY OF SCIENCES OF THE UNITED STATES OF AMERICA 109, 2132-2137) photoreceptors and to be capable of mediating retinal therapy.

[0005] An important challenge in delivering Cas9 and guide RNAs via AAV is that the DNA required to express both components exceeds the packaging limit of AAV, approximately 4.7-4.9 kb, while the DNA required to express Cas9 and the gRNA, by conventional methods, exceeds 5 kb (promoter, ˜500 bp: spCas9, 4.140 bp: Pol II terminator, ˜250 bp: U6 promoter, ˜315 bp: and the gRNA, ˜100 bp). Swiech et al. (2015, NATURE BIOTECHNOLOGY 33, 102-106) addressed this challenge by using a two-vector approach: one AAV vector to deliver the Cas9 and another AAV vector for the delivery of gRNA. However, the double AAV approach in this study took advantage of a particularly small promoter, the murine Mecp2 promoter, which although expressed in retinal cells is not expressed in rods (Song et al. (2014) EPIGENETICS & CHROMATIN 7, 17: Jain et al. (2010) PEDIATRIC NEUROLOGY 43, 35-40). Thus this system as constructed would be suitable only for therapeutic interventions in certain areas of the retina, not including the rods.

[0006] Accordingly, there is a need in the art for constructs that allow for the production of gene editing systems including both a nuclease and gRNA that fit in a single vector, e.g., an AAV vector, and can drive expression in a variety of cell and tissue types.

### SUMMARY OF THE INVENTION

[0007] The disclosure is based, in part, upon the discovery of compact, bidirectional promoters that can be used to express both a nuclease (e.g., a Cas9 nuclease) and a guide RNA (gRNA). For example, in certain embodiments disclosed herein, a compact, bidirectional promoter can comprise at least one regulatory element that directs expression of a gRNA in one direction and at least one regulatory element that directs expression of a nuclease in the other direction. Accordingly, the promoters disclosed herein use less space than prior art promoters, allowing both a nuclease and a gRNA to be packaged in a single vector (e.g., a plasmid or an AAV).

[0008] In one aspect, the disclosure relates to a non-naturally occurring nuclease system including a vector including a compact bidirectional promoter, wherein the compact bidirectional promoter comprises: a) at least one regulatory element that provides for transcription in one direction of at least one nucleotide sequence encoding a guide RNA (gRNA), wherein the gRNA hybridizes with a target sequence of a nucleic acid: and b) at least one regulatory element that provides for transcription in the opposite direction of a nucleotide sequence encoding a nuclease, wherein the gRNA targets and hybridizes with the target sequence and directs the nuclease to the nucleic acid, wherein the bidirectional promoter is not one or more of SEQ ID NO: 70-SEQ ID NO: 106 and SEQ ID NO: 241-SEQ ID NO: 255).

[0009] In another aspect, the disclosure relates to a non-naturally occurring nuclease system including a vector including a compact bidirectional promoter, wherein the compact bidirectional promoter comprises both RNA pol II and RNA pol III activity, wherein a) the promoter provides for transcription of at least one nucleotide sequence encoding a guide RNA (gRNA), wherein the gRNA hybridizes with a target sequence of a nucleic acid: and b) the promoter provides for transcription of a nucleotide sequence encoding a nuclease, wherein the gRNA targets and hybridizes with the target sequence and directs the nuclease to the nucleic acid, wherein the bidirectional promoter is not one or more of SEQ ID NO: 70-SEQ ID NO: 106 and SEQ ID NO: 241-SEQ ID NO: 255.

[0010] In certain embodiments, the compact bidirectional promoter is between 50 and 225 bp. In certain embodiments, the compact bidirectional promoter is between 50 and 200 bp. In certain embodiments, the compact bidirectional promoter is between 50 and 180 bp.

[0011] In certain embodiments, the compact bidirectional promoter comprises a nucleic acid sequence selected from SEQ ID NOs: 107-255 or the portion of any one of SEQ ID NOs: 25-106, 469-476, 559-564, 609-614, 673-678, 681, 692-697, 706-711, 719-724, 729-734, 748-753, 784-789, 904-909, 920-925, 936-1303, or any sequence in FIGS. 3-19 that corresponds to an H1 promoter (e.g., from about nucleotide 20 to about nucleotide 490 as numbered in FIG. 3), or a nucleic acid sequence having at least about 80%, at least about 85%, at least about 90%, at least about 95%, at least about 98%, at least about 99%, or at least about 99.5% identity thereto.

[0012] In certain embodiments, the compact bidirectional promoter comprises an H1 promoter. In certain embodiments, the H1 promoter is selected from the portion of any one of SEQ ID NOs: 25-106, 469-476, 559-564, 609-614, 673-678, 681, 692-697, 706-711, 719-724, 729-734, 748-753, 784-789, 904-909, 920-925, 936-1303, or any sequence in FIGS. 3-19 that corresponds to an H1 promoter (e.g., from about nucleotide 20 to about nucleotide 490 as numbered in FIG. 3), or a promoter having at least about 80%, at least about 85%, at least about 90%, at least about 95%, at least about 98%, at least about 99%, or at least about 99.5% identity thereto.

[0013] In certain embodiments, the compact bidirectional promoter comprises a Gar1 promoter. In certain embodiments, the Gar1 promoter is selected from SEQ ID NOs: 107-203, or a promoter having at least about 80%, at least about 85%, at least about 90%, at least about 95%, at least about 98%, at least about 99%, or at least about 99.5% identity thereto. In certain embodiments, the Gar1 promoter is a human Gar1 promoter.

[0014] In certain embodiments, the compact promoter comprises a bidirectional promoter selected from SEQ ID NOs: 204-255, or a promoter having at least about 80%, at least about 85%, at least about 90%, at least about 95%, at least about 98%, at least about 99%, or at least about 99.5% identity thereto.

[0015] In certain embodiments, the compact promoter comprises at least 95%, 98%, 99%, 99.5% or 100% identity to a naturally-occurring mammalian promoter.

[0016] In certain embodiments, the target sequence comprises the nucleotide sequence

AN₁₉NGG,
GN₁₉NGG,
CN₁₉NGG,
or
TN₁₉NGG.

[0017] In certain embodiments, the nuclease is an RNA-directed nuclease. In certain embodiments, the RNA-directed nuclease is a Cas protein. In certain embodiments, the Cas protein is codon optimized for expression in the cell and/or is a Type-II Cas protein or a Type-V Cas protein. In certain embodiments, the cell is a eukaryotic cell. In certain embodiments, the eukaryotic cell is a mammalian cell. In certain embodiments, the eukaryotic cell is a human cell.

[0018] In certain embodiments, the system is packaged into a single vector.

[0019] In another aspect, the disclosure relates to an expression construct including a nuclease system as described herein.

[0020] In another aspect, the disclosure relates to a vector including an expression construct as described herein. In certain embodiments, the vector comprises an adeno-associated viral (AAV) vector. In certain embodiments, the AAV vector comprises an AAV-6 vector.

[0021] In another aspect, the disclosure relates to a method that includes introducing into a cell a non-naturally occurring nuclease system including a vector including a compact bidirectional promoter, wherein the compact bidirectional promoter comprises: a) at least one regulatory element that provides for transcription in one direction of at least one nucleotide sequence encoding a guide RNA (gRNA), wherein the gRNA hybridizes with a target sequence of a nucleic acid molecule: and b) at least one regulatory element that provides for transcription in the opposite direction of a nucleotide sequence encoding a nuclease, wherein the gRNA targets and hybridizes with the target sequence and directs the nuclease to the nucleic acid molecule, wherein the bidirectional promoter is not one or more of SEQ ID NO: 70-SEQ ID NO: 106 and SEQ ID NO: 241-SEQ ID NO: 255.

[0022] In another aspect, the disclosure relates to a method including introducing into a cell a non-naturally occurring nuclease system including a vector including a compact bidirectional promoter, wherein the compact bidirectional promoter comprises both RNA pol II and RNA pol III activity, wherein a) the promoter provides for transcription of at least one nucleotide sequence encoding a guide RNA (gRNA), wherein the gRNA hybridizes with a target sequence of a nucleic acid: and b) the promoter provides for transcription of a nucleotide sequence encoding a nuclease, wherein the gRNA targets and hybridizes with the target sequence and directs the nuclease to the nucleic acid, wherein the bidirectional promoter is not one or more of SEQ ID NO: 70-SEQ ID NO: 106 and SEQ ID NO: 241-SEQ ID NO: 255.

[0023] In certain embodiments, the compact bidirectional promoter is between 50 and 225 bp. In certain embodiments, the compact bidirectional promoter is between 50 and 200 bp. In certain embodiments, the compact bidirectional promoter is between 50 and 180 bp.

[0024] In certain embodiments, the bidirectional promoter comprises a nucleic acid sequence selected from SEQ ID NOs: 107-255 or the portion of any one of SEQ ID NOs: 25-106, 469-476, 559-564, 609-614, 673-678, 681, 692-697, 706-711, 719-724, 729-734, 748-753, 784-789, 904-909, 920-925, 936-1303, or any sequence in FIGS. 3-19 that corresponds to an H1 promoter (e.g., from about nucleotide 20 to about nucleotide 490 as numbered in FIG. 3), or a nucleic acid sequence having at least about 80%, at least about 85%, at least about 90%, at least about 95%, at least about 98%, at least about 99%, or at least about 99.5% identity thereto.

[0025] In certain embodiments, the compact bidirectional promoter comprises an H1 promoter. In certain embodiments, the H1 promoter is selected from the portion of any one of SEQ ID NOs: 25-106, 469-476, 559-564, 609-614, 673-678, 681, 692-697, 706-711, 719-724, 729-734, 748-753, 784-789, 904-909, 920-925, 936-1303, or any sequence in FIGS. 3-19 that corresponds to an H1 promoter (e.g., from about nucleotide 20 to about nucleotide 490 as numbered in FIG. 3), or a promoter having at least about 80%, at least about 85%, at least about 90%, at least about 95%, at least about 98%, at least about 99%, or at least about 99.5% identity thereto.

[0026] In certain embodiments, the compact bidirectional promoter comprises a Gar1 promoter. In certain embodiments, the Gar1 promoter is selected from SEQ ID NOs: 107-203, or a promoter having at least about 80%, at least about 85%, at least about 90%, at least about 95%, at least about 98%, at least about 99%, or at least about 99.5% identity thereto. In certain embodiments, the Gar1 promoter is a human Gar1 promoter.

[0027] In certain embodiments, the compact promoter comprises a bidirectional promoter selected from SEQ ID NOs: 204-255, or a promoter having at least about 80%, at least about 85%, at least about 90%, at least about 95%, at least about 98%, at least about 99%, or at least about 99.5% identity thereto.

[0028] In certain embodiments, the compact promoter does not comprise a viral promoter and/or a synthetic promoter.

[0029] In certain embodiments, the compact promoter comprises at least 95%, 98%, 99%, 99.5% or 100% identity to a naturally-occurring mammalian promoter.

[0030] In certain embodiments, the target sequence comprises the nucleotide sequence

AN₁₉NGG,
GN₁₉NGG,
CN₁₉NGG,
or
TN₁₉NGG.

[0031] In certain embodiments, the nuclease is an RNA-directed nuclease. In certain embodiments, the RNA-directed nuclease is a Cas9 protein. In certain embodiments, the Cas9 protein is codon optimized for expression in the cell and/or is a Type-II Cas9 protein.

[0032] In certain embodiments, the cell is a eukaryotic cell optionally selected from the group consisting of (i) a mammalian cell, (ii) a human cell, and/or (iii) a retinal photoreceptor cell.

[0033] In certain embodiments, the system is packaged into a single adeno-associated virus (AAV) particle.

[0034] These and other aspects and features of the invention are described in the following detailed description and claims.

### DESCRIPTION OF THE DRAWINGS

[0035] The invention can be more completely understood with reference to the following drawings.

[0036] FIG. 1 is a schematic showing the region in which the H1 promoter is located, between the start of the H1RNA gene (left) to the start of the PARP-2 gene (right). Transcription factor binding sites including Staf, DSE, PSE, c-REL, GATA-1, GATA-2, and CREB are shown. In addition, the B recognition sequence (BRE) and TATA box are shown.

[0037] FIG. 2 provides Hidden Markov model (HMM) used to identify H1 promoter sequences.

[0038] FIG. 3 provides an alignment of Artiodactyla, Carnivora, Cetacea, Chiroptera, Insectivore, Lagomorpha, Marsupial, Pangolin, Perissodactyla, Primate, Rodent, and Xenartha H1 promoters.

[0039] FIG. 4 provides an alignment of human and Orycteropus afer H1 promoters, showing the 132 bp insertion and 12 bp insertion found in the Orycteropus afer H1 promoter. The human H1 promoter corresponds to SEQ ID NO: 87 and the Orycteropus afer H1 promoter corresponds to SEQ ID NO: 25. The consensus sequence corresponds to SEQ ID NO: 1808.

[0040] FIG. 5 provides an alignment of H1 promoter sequences from Artiodactyla species.

[0041] FIG. 6 provides an alignment of H1 promoter sequences from Carnivora species.

[0042] FIG. 7 provides an alignment of H1 promoter sequences from Cetacea species.

[0043] FIG. 8 provides an alignment of H1 promoter sequences from Chiroptera species.

[0044] FIG. 9 provides an alignment of H1 promoter sequences from Dermoptera species.

[0045] FIG. 10 provides an alignment of H1 promoter sequences from Hyracoidae species.

[0046] FIG. 11 provides an alignment of H1 promoter sequences from Insectivora species.

[0047] FIG. 12 provides an alignment of H1 promoter sequences from Lagomorpha species.

[0048] FIG. 13 provides an alignment of H1 promoter sequences from Marsupial species.

[0049] FIG. 14 provides an alignment of H1 promoter sequences from Pangolin species.

[0050] FIG. 15 provides an alignment of H1 promoter sequences from Perissodactyla species.

[0051] FIG. 16 provides an alignment of H1 promoter sequences from Primate species.

[0052] FIG. 17 provides an second alignment of H1 promoter sequences from Primate species showing the TATA box, PSE, Staf, and DSE binding sites.

[0053] FIG. 18 provides an alignment of H1 promoter sequences from Rodent species.

[0054] FIG. 19 provides an alignment of H1 promoter sequences from Xenartha species.

[0055] FIG. 20A depicts DNA alignment and conservation of the H1 bidirectional promoter, from the start of the H1RNA gene (left) to the start of the PARP-2 gene (right). FIG. 20B depicts RNA polymerase II-driven promoter activity in Hela cells. Also depicted is the length of each promoter shown in the red bars, plotted against the right Y axis.

[0056] FIG. 21 provides a schematic representation of mouse H1 promoter deletion constructs evaluated as described in Example 2.

[0057] FIG. 22 shows an alignment of mouse H1 promoter deletion constructs evaluated as described in Example 2.

[0058] FIG. 23 shows a bar graph showing normalized firefly to nanoluc luciferase signal for each mouse H1 promoter deletion constructs described in Example 2.

[0059] FIG. 24 provides a schematic representation of 17 mouse H1 promoter mutation constructs that were designed by walking across the promoter in 10 bp increments and replacing the sequence with its reverse complement.

[0060] FIG. 25 provides a sequence alignment of the mouse H1 promoter mutation constructs provided in FIG. 24.

[0061] FIG. 26 shows a bar graph showing normalized firefly to nanoluc luciferase signal for each mouse H1 promoter mutation constructs described in Example 3.

[0062] FIG. 27 provides a schematic representation of 12 constructs designed to incorporate introns into the mouse H1 promoter region.

[0063] FIG. 28 shows a bar graph showing normalized firefly to nanoluc luciferase signal for each mouse H1 intron constructs described in Example 4.

[0064] FIG. 29 provides a schematic showing the design of human H1 promoter and variant constructs. As shown in FIG. 29, a construct carrying a human H1 promoter alone (p144), a human H1 promoter with a 9 bp Kozak sequence (GCCGCCACC) (SEQ ID NO: 256) (p145), a human H1 promoter with a beta-globin 5′UTR (p146), and a human H1 promoter with a TATA box mutation (TATAA->TCGAA) (p147) were designed.

[0065] FIG. 30 provides a sequence alignment of the constructs provided in FIG. 29.

[0066] FIG. 31 shows a bar graph showing normalized firefly to nanoluc luciferase signal for each human H1 wt and 5′UTR construct described in Example 5.

[0067] FIG. 32 provides a schematic showing the design of mouse H1 promoter and 5′UTR variant constructs.

[0068] FIG. 33 provides a sequence alignment of the constructs provided in FIG. 32.

[0069] FIG. 34 shows a bar graph showing normalized firefly to nanoluc luciferase signal for each mouse H1 wt and 5′UTR construct described in Example 5.

[0070] FIG. 35 shows a bar graph showing normalized firefly to nanoluc luciferase signal for each bidirectional promoter construct described in Example 6. The promoters were human H1 (p144: SEQ ID NO: 87), mouse H1 (p148: SEQ ID NO: 93), human 7sk-1 (p199: SEQ ID NO: 242), mouse 7sk-1 (p203: SEQ ID NO: 204), human ALOXE3 (p204: SEQ ID NO: 246), human CGB1 (p206: SEQ ID NO: 247), human CGB2 (p207: SEQ ID NO: 248), human GAR1-1 (p216; SEQ ID NO: 107), human Med16-1 (p222: SEQ ID NO: 249), human Med16-2 (p223: SEQ ID NO: 250), human SRP (p242: SEQ ID NO: 233).

[0071] FIG. 36 is a graph showing the optimization of a luciferase reporter assay. HEK293 cells were co-transfected with firefly luciferase and NANOLUCR® reporter plasmids under the control of standard promoters p006 (EF1a), p323 (PGK), and p322 (TK). Normalized luciferase expression (firefly:NANOLUCR) was quantified for transfection ratios of 90:10 ng, 99: 1 ng, and 100:0.1 ng.

[0072] FIG. 37 is a bar graph showing normalized luciferase signal (firefly: NANOLUCR) for a library of H1 promoters including p095, p127, p110, p109, p088, p094, p060, p071, p077, p103, p100, p102, p092, p073, p100, p102, p092, p073, p083, p130, p066, p089, p112, p101, p099, p116, p098, p069, p106, p131, p081, p107, p074, p072, p082, p097, p108, p065, p122, p114, p070, p091, p062, p119, p113, p063, p064, p090, p079, p105, p067, p128, p124, p084, p126, p078, p086, p093, p059, p058, p087, p061, p085, p129, p096, p111, p125, p115, p068, p118, p117, p076, p120, p123, and p104 in CFBE410-cells. Control TK promoter normalized luciferase activity is shown as p322.

[0073] FIG. 38 is a bar graph showing normalized luciferase signal (firefly: NANOLUCR) for a library of H1 promoters including p095, p127, p088, p094, p087, p1 10, p109, p083, p100, p073, p116, p092, p077, p066, p130, p101, p079, p071, p081, p119, p065, p098, p097, p060, p061, p089, p078, p070, p102, p084, p086, p059, p099, p106, p069, p125, p117, p058, p067, p129, p126, p107, p122, p064, p112, p062, p085, p091, p082, p072, p131, p090, p093, p063, p068, p114, p120, p115, p074, p076, p108, p113, p096, p124, p105, p103, p118, p128, p111, p123, and p104 in A549 cells. Control TK promoter normalized luciferase activity is shown as p322.

[0074] FIG. 39 is a bar graph showing normalized luciferase signal (firefly: NANOLUCR) for a library of H1 promoters including p095, p127, p094, p110, p107, p109, p102, p084, p071, p087, p101, p088, p097, p092, p066, p077, p106, p065, p099, p078, p116, p081, p119, p083, p098, p131, p073, p112, p100, p062, p103, p091, p061, p072, p129, p068, p114, p120, p060, p070, p118, p059, p113, p089, p108, p069, p067, p122, p124, p058, p079, p115, p093, p130, p086, p074, p125, p063, p126, p117, p090, p076, p096, p128, p105, p111, p123, p085, p082, p064, and p104 in Calu3 cells. Control TK promoter normalized luciferase activity is shown as p322.

[0075] FIG. 40A is a violin plot showing log-scale expression of a library of H1 promoters in three lung cell types (CFBE410-, A549, and Calu3). Vertical axis represents relative luminescence units.

[0076] FIG. 40B is a violin plot showing log-scale expression of a library of H1 promoters in Calu-3 cells compared to the expression activity of standard promoters TK, PGK, and EF1a.

[0077] FIG. 41 is a series of graphs showing linear regression analysis to compare the expression activity of each of the promoters in the library (each dot on represents a promoter) in different cell types.

[0078] FIG. 42 is a plot showing hierarchical clustering of a library of H1 promoters segregated by activity in three lung cell types (CFBE410-marked with a*, A549 marked with a †, and Calu3 marked with a ‡ and one control cell type (HeLa marked with a ♦)

### DETAILED DESCRIPTION

[0079] Various features and aspects of the invention are discussed in more detail below.

[0080] The disclosure is based, in part, upon the discovery of compact, bidirectional promoters that can be used to express both a nuclease (e.g., a Cas9 nuclease) and a guide RNA (gRNA). For example, in certain embodiments disclosed herein, a compact, bidirectional promoter can comprise at least one regulatory element that directs expression of a gRNA in one direction and at least one regulatory element that directs expression of a nuclease in the other direction.

[0081] Accordingly, the disclosure provides nucleic acids, expression constructs, and vectors comprising a compact bidirectional promoter and a gene editing system, wherein the compact promoter is small enough to allow for the inclusion of both a nuclease and a guide RNA (gRNA) in a single vector, such as an AAV vector, which has a size limit that makes expression of both nuclease and gRNA difficult using conventional promoters.

[0082] Unless otherwise defined herein, scientific and technical terms used in this application shall have the meanings that are commonly understood by those of ordinary skill in the art.

[0083] Generally, nomenclature used in connection with, and techniques of, pharmacology, cell and tissue culture, molecular biology, cell and cancer biology, neurobiology, neurochemistry, virology, immunology, microbiology, genetics and protein and nucleic acid chemistry, described herein, are those well-known and commonly used in the art. In case of conflict, the present specification, including definitions, will control.

[0084] The practice of the present disclosure will employ, unless otherwise indicated, conventional techniques of molecular biology (including recombinant techniques), 0) microbiology, cell biology, biochemistry and immunology, which are within the skill of the art. Such techniques are explained fully in the literature, such as, Molecular Cloning: A Laboratory Manual, second edition (Sambrook et al., 1989) Cold Spring Harbor Press; Oligonucleotide Synthesis (M. J. Gait, ed., 1984); Methods in Molecular Biology, Humana Press: Cell Biology: A Laboratory Notebook (J. E. Cellis, ed., 1998) Academic Press: Animal Cell Culture (R. I. Freshney, ed., 1987): Introduction to Cell and Tissue Culture (J. P. Mather and P. E. Roberts, 1998) Plenum Press: Cell and Tissue Culture: Laboratory Procedures (A. Doyle, J. B. Griffiths, and D. G. Newell, eds., 1993-1998) J. Wiley and Sons: Methods in Enzymology (Academic Press, Inc.): Gene Transfer Vectors for Mammalian Cells (J. M. Miller and M. P. Calos, eds., 1987): Current Protocols in Molecular Biology (F. M. Ausubel et al., eds., 1987): PCR: The Polymerase Chain Reaction, (Mullis et al., eds., 1994): Sambrook and Russell, Molecular Cloning: A Laboratory Manual, 3rd. ed., Cold Spring Harbor Laboratory Press, Cold Spring Harbor, NY (2001): Ausubel et al., Current Protocols in Molecular Biology, John Wiley & Sons, NY (2002): Harlow and Lane Using Antibodies: A Laboratory Manual, Cold Spring Harbor Laboratory Press, Cold Spring Harbor, NY (1998); Coligan et al., Short Protocols in Protein Science, John Wiley & Sons, NY (2003): Short Protocols in Molecular Biology (Wiley and Sons, 1999).

[0085] Enzymatic reactions and purification techniques are performed according to manufacturer's specifications, as commonly accomplished in the art or as described herein. The nomenclatures used in connection with, and the laboratory procedures and techniques of, analytical chemistry, biochemistry, immunology, molecular biology, synthetic organic chemistry, and medicinal and pharmaceutical chemistry described herein are those well-known and commonly used in the art. Standard techniques are used for chemical syntheses, and chemical analyses.

[0086] Throughout this specification and embodiments, the word “comprise,” or variations such as “comprises” or “comprising.” will be understood to imply the inclusion of a stated integer or group of integers but not the exclusion of any other integer or group of integers.

[0087] It is understood that wherever embodiments are described herein with the language “comprising,” otherwise analogous embodiments described in terms of “consisting of” and/or “consisting essentially of” are also provided.

[0088] The term “including” is used to mean “including but not limited to.” “Including” and “including but not limited to” are used interchangeably.

[0089] Any example(s) following the term “e.g.” or “for example” is not meant to be exhaustive or limiting.

[0090] Unless otherwise required by context, singular terms shall include pluralities and plural terms shall include the singular.

[0091] The articles “a” and “an” are used herein to refer to one or to more than one (i.e., to at least one) of the grammatical object of the article. By way of example, “an element” means one element or more than one element. Reference to “about” a value or parameter herein includes (and describes) embodiments that are directed to that value or parameter per se. For example, description referring to “about X” includes description of “X.” Numeric ranges are inclusive of the numbers defining the range.

[0092] Notwithstanding that the numerical ranges and parameters setting forth the broad scope of the disclosure are approximations, the numerical values set forth in the specific examples are reported as precisely as possible. Any numerical value, however, inherently contains certain errors necessarily resulting from the standard deviation found in their respective testing measurements. Moreover, all ranges disclosed herein are to be understood to encompass any and all subranges subsumed therein. For example, a stated range of “1 to 10” should be considered to include any and all subranges between (and inclusive of) the minimum value of 1 and the maximum value of 10: that is, all subranges beginning with a minimum value of 1 or more, e.g., 1 to 6.1, and ending with a maximum value of 10 or less, e.g., 5.5 to 10.

[0093] Where aspects or embodiments of the disclosure are described in terms of a Markush group or other grouping of alternatives, the present disclosure encompasses not only the entire group listed as a whole, but each member of the group individually and all possible subgroups of the main group, but also the main group absent one or more of the group members. The present disclosure also envisages the explicit exclusion of one or more of any of the group members in an embodiment of the disclosure.

[0094] Exemplary methods and materials are described herein, although methods and materials similar or equivalent to those described herein can also be used in the practice or testing of the present disclosure. The materials, methods, and examples are illustrative only and not intended to be limiting.

### I. Definitions

[0095] The following terms, unless otherwise indicated, shall be understood to have the following meanings:

[0096] As used herein, “residue” refers to a position in a protein and its associated amino acid identity.

[0097] As known in the art, “polynucleotide,” or “nucleic acid,” as used interchangeably herein, refer to chains of nucleotides of any length, and include DNA and RNA. The nucleotides can be deoxyribonucleotides, ribonucleotides, modified nucleotides or bases, and/or their analogs, or any substrate that can be incorporated into a chain by DNA or RNA polymerase. A polynucleotide may comprise modified nucleotides, such as methylated nucleotides and their analogs. If present, modification to the nucleotide structure may be imparted before or after assembly of the chain. The sequence of nucleotides may be interrupted by non-nucleotide components. A polynucleotide may be further modified after polymerization, such as by conjugation with a labeling component. Other types of modifications include, for example, “caps”, substitution of one or more of the naturally occurring nucleotides with an analog, internucleotide modifications such as, for example, those with uncharged linkages (e.g., methyl phosphonates, phosphotriesters, phosphoamidates, carbamates, etc.) and with charged linkages (e.g., phosphorothioates, phosphorodithioates, etc.), those containing pendant moieties, such as, for example, proteins (e.g., nucleases, toxins, antibodies, signal peptides, poly-L-lysine, etc.), those with intercalators (e.g., acridine, psoralen, etc.), those containing chelators (e.g., metals, radioactive metals, boron, oxidative metals, etc.), those containing alkylators, those with modified linkages (e.g., alpha anomeric nucleic acids, etc.), as well as unmodified forms of the polynucleotide(s). Further, any of the hydroxyl groups ordinarily present in the sugars may be replaced, for example, by phosphonate groups, phosphate groups, protected by standard protecting groups, or activated to prepare additional linkages to additional nucleotides, or may be conjugated to solid supports. The 5 ‘ and 3’ terminal OH can be phosphorylated or substituted with amines or organic capping group moieties of from 1 to 20 carbon atoms. Other hydroxyls may also be derivatized to standard protecting groups. Polynucleotides can also contain analogous forms of ribose or deoxyribose sugars that are generally known in the art, including, for example, 2′-O-methyl-, 2′-O-allyl, 2′-fluoro- or 2′-azido-ribose, carbocyclic sugar analogs, alpha- or beta-anomeric sugars, epimeric sugars such as arabinose, xyloses or lyxoses, pyranose sugars, furanose sugars, sedoheptuloses, acyclic analogs and abasic nucleoside analogs such as methyl riboside. One or more phosphodiester linkages may be replaced by alternative linking groups. These alternative linking groups include, but are not limited to, embodiments wherein phosphate is replaced by P(O)S(“thioate”), P(S)S (“dithioate”), (O)NRi (“amidate”), P(O)R, P(O)OR′, CO or CH2 (“formacetal”), in which each R or R′ is independently H or substituted or unsubstituted alkyl (1-20 C) optionally containing an ether (—O—) linkage, aryl, alkenyl, cycloalkyl, cycloalkenyl or araldyl. Not all linkages in a polynucleotide need be identical. The preceding description applies to all polynucleotides referred to herein, including RNA and DNA.

[0098] IUPAC nucleotide code is used throughout. IUPAC nucleotide code is provided in TABLE 1.

TABLE 1

| | |
|---|---|
| A | Adenine |
| C | Cytosine |
| G | Guanine |
| T (or U) | Thymine (or Uracil) |
| R | A or G |
| Y | C or T |
| S | G or C |
| W | A or T |
| K | G or T |
| M | A or C |
| B | C or G or T |
| D | A or G or T |
| H | A or C or T |
| V | A or C or G |
| N | any base |
| . or - | gap |

[0099] The terms “polypeptide,” “oligopeptide,” “peptide” and “protein” are used interchangeably herein to refer to chains of amino acids of any length. The chain may be linear or branched, it may comprise modified amino acids, and/or may be interrupted by non-amino acids. The terms also encompass an amino acid chain that has been modified naturally or by intervention: for example, disulfide bond formation, glycosylation, lipidation, acetylation, phosphorylation, or any other manipulation or modification, such as conjugation with a labeling component. Also included within the definition are, for example, polypeptides containing one or more analogs of an amino acid (including, for example, unnatural amino acids, etc.), as well as other modifications known in the art. It is understood that the polypeptides can occur as single chains or associated chains.

[0100] As used herein, the term “functional fragment” refers to a fragment of (a) a promoter or (b) a gene or coding sequence (e.g., an mRNA) that encodes a protein (e.g., a nuclease) that retains, for example, at least 10%, at least 20%, at least 30%, at least 40%, at least 50%, at least 60%, at least 70%, at least 80%, at least 90%, at least 95%, or 100% of at least one activity of the corresponding full-length, naturally occurring promoter or protein.

[0101] As used herein, the term “variant” refers to a variant of (a) a promoter or (b) a gene or coding sequence (e.g., an mRNA) that encodes a protein (e.g., a nuclease) that retains, for example, at least 10%, at least 20%, at least 30%, at least 40%, at least 50%, at least 60%, at least 70%, at least 80%, at least 90%, at least 95%, or 100% of at least one activity of the corresponding full-length, naturally occurring promoter or protein. For example, a variant can comprise a splice variant or a gene comprising a mutation such as an insertion, deletion, or substitution.

[0102] “Homologous,” in all its grammatical forms and spelling variations, refers to the relationship between two proteins that possess a “common evolutionary origin,” including proteins from superfamilies in the same species of organism, as well as homologous proteins from different species of organism. Such proteins (and their encoding nucleic acids) have sequence homology, as reflected by their sequence similarity, whether in terms of percent identity or by the presence of specific residues or motifs and conserved positions.

[0103] However, in common usage and in the instant application, the term “homologous,” when modified with an adverb such as “highly,” may refer to sequence similarity and may or may not relate to a common evolutionary origin.

[0104] The term “sequence similarity,” in all its grammatical forms, refers to the degree of identity or correspondence between nucleic acid or amino acid sequences that may or may not share a common evolutionary origin.

[0105] “Percent (%) sequence identity” or “percent (%) identical to” with respect to a reference polypeptide (or nucleotide) sequence is defined as the percentage of amino acid residues (or nucleic acids) in a candidate sequence that are identical with the amino acid residues (or nucleic acids) in the reference polypeptide (nucleotide) sequence, after aligning the sequences and introducing gaps, if necessary, to achieve the maximum percent sequence identity, and not considering any conservative substitutions as part of the sequence identity. Alignment for purposes of determining percent amino acid sequence identity can be achieved in various ways that are within the skill in the art, for instance, using publicly available computer software such as BLAST, BLAST-2, ALIGN or Megalign (DNASTAR) software. Those skilled in the art can determine appropriate parameters for aligning sequences, including any algorithms needed to achieve maximal alignment over the full length of the sequences being compared.

[0106] Within a recombinant expression vector, “operably linked” is intended to mean that the nucleotide sequence of interest is linked to the regulatory element(s) in a manner that allows for expression of the nucleotide sequence: (e.g., in an in vitro transcription/translation system or in a host cell when the vector is introduced into the host cell).

[0107] The term “regulatory element” is intended to include promoters, enhancers, internal ribosomal entry sites (IRES), and other expression control elements (e.g. transcription termination signals, such as polyadenylation signals and poly-U sequences). Such regulatory elements are described, for example, in Goeddel (1990) Gene Expression Technology: Methods in Enzymology 185, Academic Press, San Diego Calif. Regulatory elements include those that direct constitutive expression. Of a nucleotide sequence in many types of host cell and those that direct expression of the nucleotide sequence only in certain host cells (e.g., tissue-specific regulatory sequences). A tissue-specific promoter may direct expression primarily in a desired tissue of interest, such as muscle, neuron bone, skin, blood, specific organs (e.g. liver, pancreas), or particular cell types (e.g. lymphocytes). Regulatory elements may also direct expression in a temporal-dependent manner, such as in a cell-cycle dependent or developmental stage-dependent manner, which may not also be tissue or cell-type specific.

[0108] In some embodiments, a vector comprises one or more pol III promoters, one or more pol II promoters, one or more pol I promoters, or combinations thereof. Examples of pol III promoters include, but are not limited to, U6 and H1 promoters. Examples of pol II promoters include, but are not limited to the retroviral Rous sarcoma virus (RSV) LTR promoter (optionally with the RSV enhancer), the cytomegalovirus (CMV) promoter (optionally with the CMV enhancer) (e.g., Boshart et al. (1985) Cell 41:521-530), the SV40 promoter, the dihydrofolate reductase promoter, the B-actin promoter, the phosphoglycerol kinase (PGK) promoter, and the EF1a promoter.

[0109] Also encompassed by the term “regulatory element” are enhancer elements, such as WPRE: CMV enhancers: the R-US' segment in LTR of HTLV-I (Takebe et al. (1988) MOL. CELL. BIOL. 8:466-472): SV40 enhancer: and the intron sequence between exons 2 and 3 of rabbit.beta.- globin (O'Hare et al. (1981) PROC. NATL. ACAD. SCI. USA. 78(3):1527-31). It will be appreciated by those skilled in the art that the design of the expression vector can depend on such factors as the choice of the host cell to be transformed, the level of expression desired, etc.

[0110] A vector can be introduced into host cells to thereby produce transcripts, proteins, or peptides, including fusion proteins or peptides, encoded by nucleic acids as described herein (e.g., clustered regularly interspersed short palindromic repeats (CRISPR) transcripts, proteins, enzymes, mutant forms thereof, fusion proteins thereof, etc.). Advantageous vectors include lentiviruses and adeno-associated viruses, and types of such vectors can also be selected for targeting particular types of cells.

[0111] In aspects of the presently disclosed subject matter the terms “chimeric RNA,” “chimeric guide RNA,” “guide RNA,” “single guide RNA” and “synthetic guide RNA” are used interchangeably and refer to the polynucleotide sequence comprising the guide sequence. The term “guide sequence” refers to the about 20 bp sequence within the guide RNA that specifies the target site and may be used interchangeably with the terms “guide” or “spacer”.

[0112] As used herein the term “wild type” is a term of the art understood by skilled persons and means the typical form of an organism, strain, gene or characteristic as it occurs in nature as distinguished from mutant or variant forms.

[0113] The terms “non-naturally occurring” and “engineered” are used interchangeably and indicate the involvement of the hand of man. The terms, when referring to nucleic acid molecules or polypeptides mean that the nucleic acid molecule or the polypeptide is at least substantially free from at least one other component with which they are naturally associated in nature and as found in nature.

[0114] As used herein, a “host cell” includes an individual cell or cell culture that can be or has been a recipient for vector(s) for incorporation of polynucleotide inserts. The term host cell may refer to the packaging cell line in which the rAAV is produced from the plasmid. In the alternative, the term “host cell” may refer to the target cell in which expression of the transgene is desired.

[0115] As used herein, a “vector,” refers to a recombinant plasmid or virus that comprises a nucleic acid to be delivered into a host cell, either in vitro or in vivo. A “recombinant viral vector” refers to a recombinant polynucleotide vector comprising one or more heterologous sequences (i.e. a nucleic acid sequence not of viral origin). In the case of recombinant AAV vectors, the recombinant nucleic acid is flanked by at least one inverted terminal repeat sequence (ITR). In some embodiments, the recombinant nucleic acid is flanked by two ITRs.

[0116] A “recombinant AAV vector (rAAV vector)” refers to a polynucleotide vector based on an adeno-associated virus comprising one or more heterologous sequences (i.e., nucleic acid sequence not of AAV origin) that are flanked by at least one AAV inverted terminal repeat sequence (ITR). Such rAAV vectors can be replicated and packaged into infectious viral particles when present in a host cell that has been infected with a suitable helper virus (or that is expressing suitable helper functions) and that is expressing AAV rep and cap gene products (i.e. AAV Rep and Cap proteins). When a rAAV vector is incorporated into a larger polynucleotide (e.g., in a chromosome or in another vector such as a plasmid used for cloning or transfection), then the rAAV vector may be referred to as a “pro-vector” which can be “rescued” by replication and encapsidation in the presence of AAV packaging functions and suitable helper functions. An rAAV vector can be in any of a number of forms, including, but not limited to, plasmids, linear artificial chromosomes, complexed with lipids, encapsulated within liposomes, and encapsidated in a viral particle, e.g., an AAV particle. An rAAV vector can be packaged into an AAV virus capsid to generate a “recombinant adeno-associated viral particle (rAAV particle)”.

[0117] An “TAAV virus” or “rAAV viral particle” refers to a viral particle composed of at least one AAV capsid protein and an encapsidated rAAV vector genome.

[0118] The term “transgene” refers to a polynucleotide that is introduced into a cell and is capable of being transcribed into RNA and optionally, translated and/or expressed under appropriate conditions. In aspects, it confers a desired property to a cell into which it was introduced, or otherwise leads to a desired therapeutic or diagnostic outcome. In another aspect, it may be transcribed into a molecule that mediates RNA interference, such as miRNA, siRNA, or shRNA.

[0119] The term “vector genome (vg)” as used herein may refer to one or more polynucleotides comprising a set of the polynucleotide sequences of a vector, e.g., a viral vector. A vector genome may be encapsidated in a viral particle. Depending on the particular viral vector, a vector genome may comprise single-stranded DNA, double-stranded DNA, or single-stranded RNA, or double-stranded RNA. A vector genome may include endogenous sequences associated with a particular viral vector and/or any heterologous sequences inserted into a particular viral vector through recombinant techniques. For example, a recombinant AAV vector genome may include at least one ITR sequence flanking a promoter, a stuffer, a sequence of interest (e.g., an RNAi), and a polyadenylation sequence. A complete vector genome may include a complete set of the polynucleotide sequences of a vector. In some embodiments, the nucleic acid titer of a viral vector may be measured in terms of vg/mL. Methods suitable for measuring this titer are known in the art (e.g., quantitative PCR).

[0120] An “inverted terminal repeat” or “ITR” sequence is a term well understood in the art and refers to relatively short sequences found at the termini of viral genomes which are in opposite orientation.

[0121] An “AAV inverted terminal repeat (ITR)” sequence, a term well-understood in the art, is an approximately 145-nucleotide sequence that is present at both termini of the native single-stranded AAV genome. The outermost 125 nucleotides of the ITR can be present in either of two alternative orientations, leading to heterogeneity between different AAV genomes and between the two ends of a single AAV genome. The outermost 125 nucleotides also contains several shorter regions of self-complementarity (designated A, A′, B, B′, C, C and D regions), allowing intrastrand base-pairing to occur within this portion of the ITR. A “helper virus” for AAV refers to a virus that allows AAV (which is a defective parvovirus) to be replicated and packaged by a host cell. A number of such helper viruses are known in the art.

[0122] As used herein, “expression control sequence” means a nucleic acid sequence that directs transcription of a nucleic acid. An expression control sequence can be a promoter, such as a constitutive promoter, or an enhancer. The expression control sequence is operably linked to the nucleic acid sequence to be transcribed.

[0123] As used herein, “isolated molecule” (where the molecule is, for example, a polypeptide, a polynucleotide, or fragment thereof) is a molecule that by virtue of its origin or source of derivation (1) is not associated with one or more naturally associated components that accompany it in its native state, (2) is substantially free of one or more other molecules from the same species (3) is expressed by a cell from a different species, or (4) does not occur in nature.

[0124] As used herein, “purify,” and grammatical variations thereof, refers to the removal, whether completely or partially, of at least one impurity from a mixture containing the polypeptide and one or more impurities, which thereby improves the level of purity of the polypeptide in the composition (i.e., by decreasing the amount (ppm) of impurity (ies) in the composition).

[0125] As used herein, “substantially pure” refers to material which is at least 50% pure (i.e., free from contaminants), more preferably, at least 90% pure, more preferably, at least 95% pure, yet more preferably, at least 98% pure, and most preferably, at least 99% pure.

[0126] The terms “patient,” “subject,” or “individual” are used interchangeably herein and refer to either a human or a non-human animal. These terms include mammals, such as humans, non-human primates, laboratory animals, livestock animals (including bovines, porcines, camels, etc.), companion animals (e.g., canines, felines, other domesticated animals, etc.) and rodents (e.g., mice and rats). In some embodiments, the subject is a human that is at least 40, 45, 50, 55, 60, 65, 70, 75, 80, 85, 90 or 95 years of age.

[0127] As used herein, the terms “prevent,” “preventing” and “prevention” refer to the prevention of the recurrence or onset of, or a reduction in one or more symptoms of a disease or condition in a subject as result of the administration of a therapy (e.g., a prophylactic or therapeutic agent). For example, in the context of the administration of a therapy to a subject for an infection, “prevent,” “preventing” and “prevention” refer to the inhibition or a reduction in the development or onset of a disease or condition, or the prevention of the recurrence, onset, or development of one or more symptoms of a disease or condition, in a subject resulting from the administration of a therapy (e.g., a prophylactic or therapeutic agent), or the administration of a combination of therapies (e.g., a combination of prophylactic or therapeutic agents).

[0128] “Treating” a condition or patient refers to taking steps to obtain beneficial or desired results, including clinical results. With respect to a disease or condition, treatment refers to the reduction or amelioration of the progression, severity, and/or duration of one or more symptoms of the disease, or the amelioration of one or more symptoms resulting from the administration of one or more therapies (including, but not limited to, the administration of one or more prophylactic or therapeutic agents).

[0129] “Administering” or “administration of a substance, a compound or an agent to a subject can be carried out using one of a variety of methods known to those skilled in the art. In some embodiments, administration may be local. In other embodiments, administration may be systemic. Administering can also be performed, for example, once, a plurality of times, and/or over one or more extended periods. In some aspects, the administration includes both direct administration, including self-administration, and indirect administration, including the act of prescribing a drug. For example, as used herein, a physician who instructs a patient to self-administer a drug, or to have the drug administered by another and/or who provides a patient with a prescription for a drug is administering the drug to the patient.

[0130] Each embodiment described herein may be used individually or in combination with any other embodiment described herein.

### II. Compact Promoters

[0131] The disclosure is based, in part, upon the discovery that compact promoters can effectively drive expression of nuclease systems, for example, those including both a nuclease and a guide RNA (gRNA). The size limitations of AAV and other vectors (e.g., plasmids) make it difficult to package both a gRNA and a nuclease into a single vector. However, this problem can be overcome by using a compact promoter, as described herein, to deliver sufficient expression of a nuclease system via a single vector.

[0132] A compact promoter provided herein can be selected to express the selected nuclease system in a desired target cell. In some embodiments, the target cell is a retinal cell, lung cell, a pancreatic cell, a liver cell, or a neuronal cell. The promoter may be derived from any species, including human. In one embodiment, the promoter is “cell specific”. The term “cell-specific” means that the particular promoter selected for the recombinant vector can direct expression of the selected transgene in a particular cell.

[0133] In certain embodiments, the promoter is of a small size, e.g., less than about 500 bp, due to the size limitations of the AAV vector. In certain embodiments, the promoter is less than about 300 bp, less than about 200 bp, between about 50 bp and about 400 bp, between about 75 bp and about 400 bp, between about 99 bp and about 400 bp, between about 100 bp and about 400 bp, between about 150 bp and about 400 bp, between about between about 200 bp and about 400 bp, between about 250 bp and about 400 bp, between about 300 bp and about 400 bp, about 50 bp and about 300 bp, about 75 bp and about 300 bp, about 100 bp and about 300 bp, about 150 bp and about 300 bp, between about 200 bp and about 300 bp, about 50 bp and about 250 bp, about 75 bp and about 250 bp, between about 100 bp and about 250 bp, between about 150 bp and about 250 bp, between about 200 bp and about 250 bp, between about 50 bp and about 200 bp, between about 75 bp and about 200 bp, between about 100 bp and about 200 bp, between about 150 bp and about 200 bp, between about 50 bp and about 150 bp, between about 100 bp and about 150 bp, between about 50 bp and about 150 bp, and between about 100 bp and about 150 bp in size.

[0134] In certain embodiments, the promoter is a bidirectional promoter. In certain embodiments, the bidirectional promoter is less than about 500 bp. In certain embodiments, the bidirectional promoter is less than about 300 bp, less than about 200 bp, between about 50 bp and about 400 bp, between about 75 bp and about 400 bp, between about 99 bp and about 400 bp, between about 100 bp and about 400 bp, between about 150 bp and about 400 bp, between about between about 200 bp and about 400 bp, between about 250 bp and about 400 bp, between about 300 bp and about 400 bp, between about 50 bp and about 300 bp, between about 75 bp and about 300 bp, between about 100 bp and about 300 bp, between about 150 bp and about 300 bp, between about 200 bp and about 300 bp, between about 50 bp and about 250 bp, between about 75 bp and about 250 bp, between about 100 bp and about 250 bp, between about 150 bp and about 250 bp, between about 200 bp and about 250 bp, between about 50 bp and about 200 bp, between about 75 bp and about 200 bp, between about 100 bp and about 200 bp, between about 150 bp and about 200 bp, between about 50 bp and about 150 bp, between about 100 bp and about 150 bp, between about 50 bp and about 150 bp, and between about 100 bp and about 150 bp in size.

[0135] In certain embodiments, the promoter comprises a nucleotide sequence having at least 85%, 90%, 95%, 96%, 97%, 98%, 99%, or 100% identity to any one of SEQ ID NO: 107-255 or the portion of any one of SEQ ID NOs: 25-106, 469-476, 559-564, 609-614, 673-678, 681, 692-697, 706-711, 719-724, 729-734, 748-753, 784-789, 904-909, 920-925, 936-1303, or the portion of any sequence in FIGS. 3-19 that corresponds to the H1 promoter (e.g., from about nucleotide 20 to about nucleotide 490 as numbered in FIG. 3) or a functional fragment or variant (e.g., codon optimized) thereof. In some embodiments, the promoter comprises the nucleotide sequence of any one of SEQ ID NO: 107-255 or the portion of any one of SEQ ID NOs: 25-106, 469-476, 559-564, 609-614, 673-678, 681, 692-697, 706-711, 719-724, 729-734, 748-753, 784-789, 904-909, 920-925, 936-1303, or the portion of any sequence in FIGS. 3-19 that corresponds to the H1 promoter (e.g., from about nucleotide 20 to about nucleotide 490 as numbered in FIG. 3) or a functional fragment or variant (e.g., codon optimized) thereof.

[0136] In certain embodiments, a functional fragment comprises a truncation of from about 10 bases to about 70 bases at the 5′ end, the 3′ end, or both the 5′ and 3′ ends of any one of SEQ ID NO: 107-255 or the portion of any one of SEQ ID NOs: 25-106, 469-476, 559-564, 609-614, 673-678, 681, 692-697, 706-711, 719-724, 729-734, 748-753, 784-789, 904-909, 920-925, 936-1303, or the portion of any sequence in FIGS. 3-19 that corresponds to the H1 promoter (e.g., from about nucleotide 20 to about nucleotide 490 as numbered in FIG. 3) or a variant thereof (e.g., a variant having at least 85%, 90%, 95%, 96%, 97%, 98%, 99%, or 100% identity to any one of SEQ ID NO: 107-255 or the portion of any one of SEQ ID NOS: 25-106, 469-476, 559-564, 609-614, 673-678, 681, 692-697, 706-711, 719-724, 729-734, 748-753, 784-789, 904-909, 920-925, 936-1303, or the portion of any sequence in FIGS. 3-19 that corresponds to the H1 promoter (e.g., from about nucleotide 20 to about nucleotide 490 as numbered in FIG. 3)). In certain embodiments, a functional fragment comprises a truncation of about 10 bases at the 5′ end, the 3′ end, or both the 5′ and 3′ ends of any one of SEQ ID NO: 107-255 or the portion of any one of SEQ ID NOs: 25-106, 469-476, 559-564, 609-614, 673-678, 681, 692-697, 706-711, 719-724, 729-734, 748-753, 784-789, 904-909, 920-925, 936-1303, or the portion of any sequence in FIGS. 3-19 that corresponds to the H1 promoter (e.g., from about nucleotide 20 to about nucleotide 490 as numbered in FIG. 3) or a variant thereof (e.g., a variant having at least 85%, 90%, 95%, 96%, 97%, 98%, 99%, or 100% identity to any one of SEQ ID NO: 107-255 or the portion of any one of SEQ ID NOS: 25-106, 469-476, 559-564, 609-614, 673-678, 681, 692-697, 706-711, 719-724, 729-734, 748-753, 784-789, 904-909, 920-925, 936-1303, or the portion of any sequence in FIGS. 3-19 that corresponds to the H1 promoter (e.g., from about nucleotide 20 to about nucleotide 490 as numbered in FIG. 3)). In certain embodiments, a functional fragment comprises a truncation of about 20 bases at the 5′ end, the 3′ end, or both the 5′ and 3′ ends of any one of SEQ ID NO: 107-255 or the portion of any one of SEQ ID NOs: 25-106, 469-476, 559-564, 609-614, 673-678, 681, 692-697, 706-711, 719-724, 729-734, 748-753, 784-789, 904-909, 920-925, 936-1303, or the portion of any sequence in FIGS. 3-19 that corresponds to the H1 promoter (e.g., from about nucleotide 20 to about nucleotide 490 as numbered in FIG. 3) or a variant thereof (e.g., a variant having at least 85%, 90%, 95%, 96%, 97%, 98%, 99%, or 100% identity to any one of SEQ ID NO: 107-255 or the portion of any one of SEQ ID NOs: 25-106, 469-476, 559-564, 609-614, 673-678, 681, 692-697, 706-711, 719-724, 729-734, 748-753, 784-789, 904-909, 920-925, 936-1303, or the portion of any sequence in FIGS. 3-19 that corresponds to the H1 promoter (e.g., from about nucleotide 20 to about nucleotide 490 as numbered in FIG. 3)). In certain embodiments, a functional fragment comprises a truncation of about 30 bases at the 5′ end, the 3′ end, or both the 5′ and 3′ ends of any one of SEQ ID NO: 107-255 or the portion of any one of SEQ ID NOs: 25-106, 469-476, 559-564, 609-614, 673-678, 681, 692-697, 706-711, 719-724, 729-734, 748-753, 784-789, 904-909, 920-925, 936-1303, or the portion of any sequence in FIGS. 3-19 that corresponds to the H1 promoter (e.g., from about nucleotide 20 to about nucleotide 490) as numbered in FIG. 3) or a variant thereof (e.g., a variant having at least 85%, 90%, 95%, 96%, 97%, 98%, 99%, or 100% identity to any one of SEQ ID NO: 107-255 or the portion of any one of SEQ ID NOS: 25-106, 469-476, 559-564, 609-614, 673-678, 681, 692-697, 706-711, 719-724, 729-734, 748-753, 784-789, 904-909, 920-925, 936-1303, or the portion of any sequence in FIGS. 3-19 that corresponds to the H1 promoter (e.g., from about nucleotide 20 to about nucleotide 490) as numbered in FIG. 3)). In certain embodiments, a functional fragment comprises a truncation of about 40 bases at the 5′ end, the 3′ end, or both the 5′ and 3′ ends of any one of SEQ ID NO: 107-255 or the portion of any one of SEQ ID NOs: 25-106, 469-476, 559-564, 609-614, 673-678, 681, 692-697, 706-711, 719-724, 729-734, 748-753, 784-789, 904-909, 920-925, 936-1303, or the portion of any sequence in FIGS. 3-19 that corresponds to the H1 promoter (e.g., from about nucleotide 20 to about nucleotide 490 as numbered in FIG. 3) or a variant thereof (e.g., a variant having at least 85%, 90%, 95%, 96%, 97%, 98%, 99%, or 100% identity to any one of SEQ ID NO: 107-255 or the portion of any one of SEQ ID NOS: 25-106, 469-476, 559-564, 609-614, 673-678, 681, 692-697, 706-711, 719-724, 729-734, 748-753, 784-789, 904-909, 920-925, 936-1303, or the portion of any sequence in FIGS. 3-19 that corresponds to the H1 promoter (e.g., from about nucleotide 20 to about nucleotide 490) as numbered in FIG. 3)). In certain embodiments, a functional fragment comprises a truncation of about 50 bases at the 5′ end, the 3′ end, or both the 5′ and 3′ ends of any one of SEQ ID NO: 107-255 or the portion of any one of SEQ ID NOs: 25-106, 469-476, 559-564, 609-614, 673-678, 681, 692-697, 706-711, 719-724, 729-734, 748-753, 784-789, 904-909, 920-925, 936-1303, or the portion of any sequence in FIGS. 3-19 that corresponds to the H1 promoter (e.g., from about nucleotide 20 to about nucleotide 490 as numbered in FIG. 3) or a variant thereof (e.g., a variant having at least 85%, 90%, 95%, 96%, 97%, 98%, 99%, or 100% identity to any one of SEQ ID NO: 107-255 or the portion of any one of SEQ ID NOS: 25-106, 469-476, 559-564, 609-614, 673-678, 681, 692-697, 706-711, 719-724, 729-734, 748-753, 784-789, 904-909, 920-925, 936-1303, or the portion of any sequence in FIGS. 3-19 that corresponds to the H1 promoter (e.g., from about nucleotide 20 to about nucleotide 490 as numbered in FIG. 3)). In certain embodiments, a functional fragment comprises a truncation of about 60 bases at the 5′ end, the 3′ end, or both the 5′ and 3′ ends of any one of SEQ ID NO: 107-255 or the portion of any one of SEQ ID NOs: 25-106, 469-476, 559-564, 609-614, 673-678, 681, 692-697, 706-711, 719-724, 729-734, 748-753, 784-789, 904-909, 920-925, 936-1303, or the portion of any sequence in FIGS. 3-19 that corresponds to the H1 promoter (e.g., from about nucleotide 20 to about nucleotide 490 as numbered in FIG. 3) or a variant thereof (e.g., a variant having at least 85%, 90%, 95%, 96%, 97%, 98%, 99%, or 100% identity to any one of SEQ ID NO: 107-255 or the portion of any one of SEQ ID NOS: 25-106, 469-476, 559-564, 609-614, 673-678, 681, 692-697, 706-711, 719-724, 729-734, 748-753, 784-789, 904-909, 920-925, 936-1303, or the portion of any sequence in FIGS. 3-19 that corresponds to the H1 promoter (e.g., from about nucleotide 20 to about nucleotide 490 as numbered in FIG. 3)). In certain embodiments, a functional fragment comprises a truncation of about 70 bases at the 5′ end, the 3′ end, or both the 5′ and 3′ ends of any one of S SEQ ID NO: 107-255 or the portion of any one of SEQ ID NOs: 25-106, 469-476, 559-564, 609-614, 673-678, 681, 692-697, 706-711, 719-724, 729-734, 748-753, 784-789, 904-909, 920-925, 936-1303, or the portion of any sequence in FIGS. 3-19 that corresponds to the H1 promoter (e.g., from about nucleotide 20 to about nucleotide 490 as numbered in FIG. 3) or a variant thereof (e.g., a variant having at least 85%, 90%, 95%, 96%, 97%, 98%, 99%, or 100% identity to any one of SEQ ID NO: 107-255 or the portion of any one of SEQ ID NOS: 25-106, 469-476, 559-564, 609-614, 673-678, 681, 692-697, 706-711, 719-724, 729-734, 748-753, 784-789, 904-909, 920-925, 936-1303, or the portion of any sequence in FIGS. 3-19 that corresponds to the H1 promoter (e.g., from about nucleotide 20 to about nucleotide 490 as numbered in FIG. 3)).

[0137] In certain embodiments, the functional fragment comprise at least a transcription factor binding site. Identification of transcription factor binding sites can be determined by consensus, or by using a differential distance matrix or multidimensional scaling (De Bleser P. et al. (2007) GENOME BIOL 8(5):R83. In certain embodiments, a functional fragment comprises at least a transcription factor binding sites selected from Staf, DSE, PSE, c-REL, GATA-1, GATA-2, and CREB. A functional fragment can comprise the B recognition sequence (BRE) or TATA box.

[0138] In certain embodiments, the promoter comprises a TATA mutation. In certain embodiments, the TATA mutation is a TATAA→TCGAA mutation.

[0139] In certain embodiments, the promoter is not one or more of an alpaca H1 promoter (SEQ ID NO: 70), an armadillo H1 promoter (SEQ ID NO: 71), a baboon H1 promoter (SEQ ID NO: 72), a bottlenose dolphin H1 promoter (SEQ ID NO: 73), a bushbaby H1 promoter (SEQ ID NO: 74), a cat H1 promoter (SEQ ID NO: 75), a chimp H1 promoter (SEQ ID NO: 76), a cow H1 promoter (SEQ ID NO: 77), a crab-eating macaque H1 promoter (SEQ ID NO: 78), a dog H1 promoter (SEQ ID NO: 79), an elephant H1 promoter (SEQ ID NO: 80), a European hedgehog H1 promoter (SEQ ID NO: 81), a ferret H1 promoter (SEQ ID NO: 82), a gorilla H1 promoter (SEQ ID NO: 83), a green monkey H1 promoter (SEQ ID NO: 84), a guinea pig H1 promoter (SEQ ID NO: 85), a horse H1 promoter (SEQ ID NO: 86), a human H1 promoter (SEQ ID NO: 87), a kangaroo rat H1 promoter (SEQ ID NO: 88), a large flying fox H1 promoter (SEQ ID NO: 89), a little brown bat H1 promoter (SEQ ID NO: 90), a marmoset H1 promoter (SEQ ID NO: 91), a mouse H1 promoter (SEQ ID NO: 92 or SEQ ID NO: 93), a northern treeshrew H1 promoter (SEQ ID NO: 94), an orangutan H1 promoter (SEQ ID NO: 95), a panda H1 promoter (SEQ ID NO: 96), a pig H1 promoter (SEQ ID NO: 97), a pika H1 promoter (SEQ ID NO: 98), a rabbit H1 promoter (SEQ ID NO: 99), a rat H1 promoter (SEQ ID NO: 100), a rock hyax H1 promoter (SEQ ID NO: 101), a sheep H1 promoter (SEQ ID NO: 102), a squirrel H1 promoter (SEQ ID NO: 103), a tarsier H1 promoter (SEQ ID NO: 104), a two-toed sloth H1 promoter (SEQ ID NO: 105), or a white cheeked gibbon H1 promoter (SEQ ID NO: 106). In certain embodiments, the promoter is not one or more of an SRP-RPS29 promoter (SEQ ID NO: 241), a 7sk1 promoter (SEQ ID NO: 242), a 7sk2 promoter (SEQ ID NO: 243), a 7sk3 promoter (SEQ ID NO: 244), an RMRP-CCDC107 promoter (SEQ ID NO: 245), an SRP-ALOXE3 promoter (SEQ ID NO: 246), a CGB1 promoter (SEQ ID NO: 247), a CGB2 promoter (SEQ ID NO: 248), a Med16-1 promoter (SEQ ID NO: 249), a Med16-2 promoter (SEQ ID NO: 250), a DPP9-1 promoter (SEQ ID NO: 251), a DPP9-2 promoter (SEQ ID NO: 252), a DPP93 promoter (SEQ ID NO: 253), a SNORD13-C8orf41 promoter (SEQ ID NO: 254), and a THEM259 promoter (SEQ ID NO: 255).

[0140] In certain embodiments, a nucleic acid comprising a promoter described herein further comprises a 5′UTR including at least a portion of a beta-globin 5′UTR sequence or a Kozak sequence. In certain embodiments, the 5′UTR includes the nucleotide sequence 5″-GCCGCCACC-3′ (SEQ ID NO: 256), or a 6 bp, a 7 bp, or an 8 bp fragment thereof. In certain embodiments, the 6 bp fragment is 5′-GCCACC-3′ (SEQ ID NO: 257).

[0141] In certain embodiments, a nucleic acid comprising a promoter described herein further comprises a terminator sequence. In certain embodiments, the terminator sequence comprises one of the terminator sequences in TABLE 2.

TABLE 2

| | |
|---|---|
| a synthetic | AATAAAATATCTTTATTTTCATTAC |
| poly(A) | ATCTGTGTGTTGGTTTTTT |
| sequence (SPA) | GTGTG (SEQ ID NO: 258) |
| SPA and Pause | AATAAAATATCTTTATTTTCATTAC |
| | ATCTGTGTGTTGGTTTTTTGTGTGA |
| | ATCGATAGTACTAACATACGCTCTC |
| | CATCAAAACAAAACGAAACAAAACA |
| | AACTAGCAAAATAGGCTGTCCCCAG |
| | TGCAAGTGCAGGTGCCAGAACATTT |
| | CTCT (SEQ ID NO: 259); |
| SV40 (240 bp) | ATCTAGATAACTGATCATAATCAGC |
| | CATACCACATTTGTAGAGGTTTTAC |
| | TTGCTTTAAAAAACCTCCCACACCT |
| | CCCCCTGAACCTGAAACATAAAATG |
| | AATGCAATTGTTGTTGTTAACTTGT |
| | TTATTGCAGCTTATAATGGTTACAA |
| | ATAAAGCAATAGCATCACAAATTTC |
| | ACAAATAAAGCATTTTTTTCACTGC |
| | ATTCTAGTTGTGGTTTGTCCAAACT |
| | CATCAATGTATCTTA |
| | (SEQ ID NO: 260) |
| SV 40-mini | TTGTTTATTGCAGCTTATAATGGTT |
| (120 bp) | ACAAATAAAGCAATAGCATCACAAA |
| | TTTCACAAATAAAGCATTTTTTTCA |
| | CTGCATTCTAGTTGTGGTTTGTCCA |
| | AACTCATCAATGTATCTTAT |
| | (SEQ ID NO: 261) |
| bGH poly A | CGACTGTGCCTTCTAGTTGCCAGCC |
| | ATCTGTTGTTTGCCCCTCCCCCGTG |
| | CCTTCCTTGACCCTGGAAGGTGCCA |
| | CTCCCACTGTCCTTTCCTAATAAAA |
| | TGAGGAAATTGCATCGCATTGTCTG |
| | AGTAGGTGTCATTCTATTCTGGGGG |
| | GTGGGGTGGGGCAGGACAGCAAGGG |
| | GGAGGATTGGGAAGACAATAGCAGG |
| | CATGCTGGGGATGCGGTGGGCTCTA |
| | TGG (SEQ ID NO: 262) |
| TKpoly A | GGGGGAGGCTAACTGAAACACGGAA |
| | GGAGACAATACCGGAAGGAACCCGC |
| | GCTATGACGGCAATAAAAAGACAGA |
| | ATAAAACGCACGGGTGTTGGGTCGT |
| | TTGTTCATAAACGCGGGGTTCGGTC |
| | CCAGGGCTGGCACTCTGTCGATACC |
| | CCACCGAGACCCCATTGGGGCCAAT |
| | ACGCCCGCGTTTCTTCCTTTTCCCC |
| | ACCCCACCCCCCAAGTTCGGGTGAA |
| | GGCCCAGGGCTCGCAGCCAACGTCG |
| | GGGCGGCAGGCCCTGCCATAG |
| | (SEQ ID NO: 263) |
| SNRP1 | GGTATCAAATAAAATACGAAATGTG |
| | ACAGATT (SEQ ID NO: 264) |
| SNRP1a | AAATAAAATACGAAATGTGACAGAT |
| | T (SEQ ID NO: 265) |
| Histone H4B | GGTTGCTGATTTCTCCACAGCTTGC |
| | ATTTCTGAACCAAAGGCCCTTTTCA |
| | GGGCCGCCCAACTAAACAAAAGAAG |
| | AGCTGTATCCATTAAGTCAAGAAGC |
| | (SEQ ID NO: 266) |
| MALAT-1 | GATTCGTCAGTAGGGTTGTAAAGGT |
| | TTTTCTTTTCCTGAGAAAACAACCT |
| | TTTGTTTTCTCAGGTTTTGCTTTTT |
| | GGCCTTTCCCTAGCTTTAAAAAAAA |
| | AAAAGCAAAAGACGCTGGTGGCTGG |
| | CACTCCTGGTTTCCAGGACGGGGTT |
| | CAAGTCCCTGCGGTGTCTTTGCTT |
| | (SEQ ID NO: 267) |
| MALAT-comp14 | AAAGGTTTTTCTTTTCCTGAGAAAT |
| | TTCTCAGGTTTTGCTTTTTAAAAAA |
| | AAAGCAAAAGACGCTGGTGGCTGGC |
| | ACTCCTGGTTTCCAGGACGGGGTTC |
| | AAGTCCCTGCGGTGTCTTTGCTT |
| | (SEQ ID NO: 268) |

[0142] In certain embodiments, the compact promoter is coupled with a viral intron (e.g., an SV40i intron, a MVM intron, a Mv2 intron, an HNRNPH1 intron, chimeric introns or synthetic introns).

[0143] In certain embodiments, the compact promoter does not comprise a viral promoter and/or a synthetic promoter.

[0144] In certain embodiments, the compact promoter comprises at least 95%, 98%, 99%, 99.5% or 100% identity to a naturally-occurring mammalian promoter. In certain embodiments, the compact promoter comprises at least 95%, 98%, 99%, 99.5% or 100% identity to a naturally-occurring human promoter.

[0145] The expression level of a compact promoter can be determined by expressing a reporter molecule in a cell, e.g., a human embryonic kidney (HEK) cell line or an N2A cell line. In certain embodiments, the compact promoter is capable of expressing a luciferase reporter at a higher level than is a HSK thymidine kinase (TK) promoter.

### H1 Promoters

[0146] In certain embodiments, the promoter is comprises an H1 promoter. The H1 promoter is a bidirectional promoter having both pol II and pol III activity. The disclosure provides previously unidentified H1 promoters that Applicant identified by generating a Hidden Markov model (HMM) profile from a multispecies alignment of known H1 promoters (see, e.g., International Patent Publication No. WO2015/195621 and WO2018/009534). Regions flanking the H1 promoter region that were conserved throughout mammals were identified. As shown in FIG. 1., the region comprising the H1 promoter is located between the RPPH1 (H1 RNA) gene located on the minus strand to the left, and the beginning (i.e., the ATG(GCG)) of the protein coding gene, PARP2, located to the right. The RPPH1 gene comprises a highly conserved region in the H1 RNA gene (5′-GGAAGCTCA-3′) that is conserved throughout all mammals. Accordingly, in certain embodiments, the H1 promoter comprises or consists of a region between the ATG(GCG) of PARP2, and the highly conserved region in the H1 RNA gene (5′-GGAAGCTCA-3′). Also shown in FIG. 1 is the position of the pol III portion of the H1 promoter. Additional conserved regions present in the H1 promoter are shown, including, for example, conserved transcription factor binding sites, like a TATA box.

[0147] A Hidden Markov model (HMM) profile for identifying H1 promoters is provided in FIG. 2.

[0148] An alignment of naturally-occurring H1 promoters and consensus sequences is provided in FIG. 3 (wherein sequences numbered 1-498 in FIG. 3 correspond to SEQ ID NOs: 1304-1803 and consensus/100%, consensus/90%, consensus/80% and consensus/70% correspond to SEQ ID NOs: 1804-1807, respectively). Nucleotides 1-19 (as numbered in the alignment) form part of the H1 RNA gene and nucleotides 491 and above (as numbered in the alignment) form part of the PARP2 gene. Accordingly, nucleotides 20-490 correspond to the H1 promoter as used herein. Thus, in certain embodiments, the H1 promoter comprises nucleotides 20-490, as numbered in the alignment (or corresponding to the numbering in the alignment of FIG. 3 for a given H1 promoter sequence not present in the alignment of FIG. 3) of any one of SEQ ID NOs: 25-106 or a sequence provided in FIGS. 3-19. In addition, nucleotides 19-280, as numbered in the alignment (or corresponding to the numbering in the alignment of FIG. 3 for a given H1 promoter sequence not present in the alignment of FIG. 3)) of any one of SEQ ID NOs: 25-106 or a sequence provided in FIGS. 3-19 correspond with the pol III portion of the H1 promoter.

[0149] An alignment of human and Orycteropus afer (Aardvark) H1 promoter sequences provided in FIG. 4 shows a 132 bp and a 12 bp insertion found in the Orycteropus afer H1 promoter sequence. Without wishing to be bound by theory, it is noted that the 144 bp insertion corresponds closely to the length of DNA required to wrap around a nucleosome (147 bp). Therefore, given the context of DNA found in eukaryotic cells, binding site distances are maintained and conserved.

[0150] In certain embodiments, the promoter is selected from a promoter in TABLE 3.

TABLE 3

| Promoter | | SEQ |
|---|---|---|
| Designation | Promoter Name | ID NO: |
| p095 | Marmoset H1 Bidirectional Promoter | 91 |
| p127 | Big brown bat H1 Bidirectional Promoter | 27 |
| p094 | Microbat H1 Bidirectional Promoter | 49 |
| p071 | Synthetic-2 H1 Bidirectional Promoter | 63 |
| p110 | Elephant H1 Bidirectional Promoter | 80 |
| p101 | Opossum H1 Bidirectional Promoter | 50 |
| p109 | David's myotis H1 Bidirectional Promoter | 38 |
| p116 | Bushbaby H1 Bidirectional Promoter | 74 |
| p066 | Star-nosed mole H1 Bidirectional Promoter | 61 |
| p060 | Tree Shrew H1 Bidirectional Promoter | 66 |
| p099 | Guinea pig H1 Bidirectional Promoter | 85 |
| p131 | Aardvark H1 Bidirectional Promoter | 25 |
| p100 | Goat H1 Bidirectional Promoter | 41 |
| p098 | Ferret H1 Bidirectional Promoter | 82 |
| p097 | Horse H1 Bidirectional Promoter | 86 |
| p092 | Killer whale H1 Bidirectional Promoter | 45 |
| p073 | Shrew H1 Bidirectional Promoter | 56 |
| p112 | Chinese tree shrew H1 Bidirectional Promoter | 36 |
| p081 | Sooty mangabey H1 Bidirectional Promoter | 59 |
| p078 | Shrew mouse H1 Bidirectional Promoter | 57 |
| p079 | Sheep H1 Bidirectional Promoter | 102 |
| p077 | Sifaka H1 Bidirectional Promoter | 58 |
| p065 | White-faced sapajou H1 Bidirectional Promoter | 69 |
| p130 | Angolan colobus H1 Bidirectional Promoter | 26 |
| p084 | Rat H1 Bidirectional Promoter | 100 |
| p106 | Cape golden mole H1 Bidirectional Promoter | 33 |
| p088 | Orangutan H1 Bidirectional Promoter | 95 |
| p091 | Mas night monkey H1 Bidirectional Promoter | 48 |
| p103 | Manatee H1 Bidirectional Promoter | 47 |
| p102 | Large flying fox H1 Bidirectional Promoter | 89 |
| p087 | Golden hamster H1 Bidirectional Promoter | 42 |
| p083 | Squirrel monkey H1 Bidirectional Promoter | 60 |
| p063 | Weddell seal H1 Bidirectional Promoter | 67 |
| p064 | Tenrec H1 Bidirectional Promoter | 64 |
| p072 | Pig H1 Bidirectional Promoter | 97 |
| p070 | Ryukyu mouse H1 Bidirectional Promoter | 55 |
| p119 | Cat H1 Bidirectional Promoter | 75 |
| p082 | Tarsier H1 Bidirectional Promoter | 104 |
| p059 | Mouse H1 Bidirectional Promoter | 92 |
| p058 | Panda H1 Bidirectional Promoter | 96 |
| p085 | Rhesus H1 Bidirectional Promoter | 54 |
| p062 | White rhinoceros H1 Bidirectional Promoter | 68 |
| p067 | Pig-tailed macaque H1 Bidirectional Promoter | 52 |
| p107 | Black flying-fox H1 Bidirectional Promoter | 28 |
| p061 | Tibetan antelope H1 Bidirectional Promoter | 65 |
| p086 | Gorilla H1 Bidirectional Promoter | 83 |
| p105 | Hedgehog H1 Bidirectional Promoter | 44 |
| p089 | Golden snub-nosed monkey H1 Bidirectional | 43 |
| | Promoter | |
| p096 | Human H1 Bidirectional Promoter | 87 |
| p090 | Gibbon H1 Bidirectional Promoter | 40 |
| p076 | Pacific walrus H1 Bidirectional Promoter | 51 |
| p113 | Crab-eating macaque H1 Bidirectional Promoter | 78 |
| p069 | Synthetic-1 H1 Bidirectional Promoter | 62 |
| p068 | Squirrel H1 Bidirectional Promoter | 103 |
| p093 | Lesser Egyptian jerboa H1 Bidirectional Promoter | 46 |
| p074 | Rabbit H1 Bidirectional Promoter | 99 |
| p125 | Chimp H1 Bidirectional Promoter | 76 |
| p124 | Brush-tailed rat H1 Bidirectional Promoter | 31 |
| p117 | Chinese hamster H1 Bidirectional Promoter | 35 |
| p114 | Drill H1 Bidirectional Promoter | 39 |
| p108 | Camel H1 Bidirectional Promoter | 32 |
| p118 | Consensus-1 H1 Bidirectional Promoter | 37 |
| p126 | Baboon H1 Bidirectional Promoter | 72 |
| p129 | Armadillo H1 Bidirectional Promoter | 71 |
| p111 | Black snub-nosed monkey H1 Bidirectional | 29 |
| | Promoter | |
| p122 | Bonobo H1 Bidirectional Promoter | 30 |
| p120 | Bottlenose dolphin H1 Bidirectional Promoter | 73 |
| p128 | Alpaca H1 Bidirectional Promoter | 70 |
| p104 | Green monkey H1 Bidirectional Promoter | 84 |
| p123 | Chinchilla H1 Bidirectional Promoter | 34 |
| p115 | Cow H1 Bidirectional Promoter | 77 |

[0151] In certain embodiments, the H1 promoter is a mammalian promoter, e.g., an artiodactyla H1 promoter, a carnivora H1 promoter, a cetacea H1 promoter, a chiroptera H1 promoter, an insectivora H1 promoter, a lagomorpha H1 promoter, a marsupial H1 promoter, a pangolin H1 promoter, a perissodactyla H1 promoter, a primate H1 promoter, a rodent H1 promoter, or a xenartha promoter. In certain embodiments, the H1 promoter is an ancestral promoter (e.g., selected from SEQ ID NOs: 936-1303). In some embodiments, the promoter comprises a nucleotide sequence having at least 85%, 90%, 95%, 96%, 97%, 98%, 99%, or 100% identity to the portion of any one of SEQ ID NOs: 25-106, 469-476, 559-564, 609-614, 673-678, 681, 692-697, 706-711, 719-724, 729-734, 748-753, 784-789, 904-909, 920-925, 936-1303, or the portion of any sequence in FIGS. 3-19 that corresponds to the H1 promoter (e.g., from about nucleotide 20 to about nucleotide 490 as numbered in FIG. 3), or a functional fragment or variant (e.g., codon optimized) thereof. In some embodiments, the promoter comprises the portion of any one of SEQ ID NOs: 25-106, 469-476, 559-564, 609-614, 673-678, 681, 692-697, 706-711, 719-724, 729-734, 748-753, 784-789, 904-909, 920-925, 936-1303, or the portion of any sequence in FIGS. 3-19 that corresponds to the H1 promoter (e.g., from about nucleotide 20 to about nucleotide 490) as numbered in FIG. 3), or a functional fragment or variant (e.g., codon optimized) thereof.

[0152] In certain embodiments, the promoter is not one or more of an alpaca H1 promoter (SEQ ID NO: 70), an armadillo H1 promoter (SEQ ID NO: 71), a baboon H1 promoter (SEQ ID NO: 72), a bottlenose dolphin H1 promoter (SEQ ID NO: 73), a bushbaby H1 promoter (SEQ ID NO: 74), a cat H1 promoter (SEQ ID NO: 75), a chimp H1 promoter (SEQ ID NO: 76), a cow H1 promoter (SEQ ID NO: 77), a crab-eating macaque H1 promoter (SEQ ID NO: 78), a dog H1 promoter (SEQ ID NO: 79), an elephant H1 promoter (SEQ ID NO: 80), a European hedgehog H1 promoter (SEQ ID NO: 81), a ferret H1 promoter (SEQ ID NO: 82), a gorilla H1 promoter (SEQ ID NO: 83), a green monkey H1 promoter (SEQ ID NO: 84), a guinea pig H1 promoter (SEQ ID NO: 85), a horse H1 promoter (SEQ ID NO: 86), a human H1 promoter (SEQ ID NO: 87), a kangaroo rat H1 promoter (SEQ ID NO: 88), a large flying fox H1 promoter (SEQ ID NO: 89), a little brown bat H1 promoter (SEQ ID NO: 90), a marmoset H1 promoter (SEQ ID NO: 91), a mouse H1 promoter (SEQ ID NO: 92 or SEQ ID NO: 93), a northern treeshrew H1 promoter (SEQ ID NO: 94), an orangutan H1 promoter (SEQ ID NO: 95), a panda H1 promoter (SEQ ID NO: 96), a pig H1 promoter (SEQ ID NO: 97), a pika H1 promoter (SEQ ID NO: 98), a rabbit H1 promoter (SEQ ID NO: 99), a rat H1 promoter (SEQ ID NO: 100), a rock hyax H1 promoter (SEQ ID NO: 101), a sheep H1 promoter (SEQ ID NO: 102), a squirrel H1 promoter (SEQ ID NO: 103), a tarsier H1 promoter (SEQ ID NO: 104), a two-toed sloth H1 promoter (SEQ ID NO: 105), or a white cheeked gibbon H1 promoter (SEQ ID NO: 106).

[0153] In certain embodiments, a functional fragment comprises a truncation of from about 10 bases to about 40 bases at the 5′ end, the 3′ end, or both the 5′ and 3′ ends of any one of SEQ ID NOs: 25-106 or a sequence provided in FIGS. 3-19, or a variant thereof (e.g., a variant having at least 85%, 90%, 95%, 96%, 97%, 98%, 99%, or 100% identity to any one of SEQ ID NOs: 25-106 or a sequence provided in FIGS. 3-19). In certain embodiments, a functional fragment comprises a truncation of about 15 bases at the 5′ end, the 3′ end, or both the 5′ and 3′ ends of any one of SEQ ID NOs: 25-106 or a sequence provided in FIGS. 3-19 or a variant thereof (e.g., a variant having at least 85%, 90%, 95%, 96%, 97%, 98%, 99%, or 100% identity to any one of SEQ ID NOs: 25-106 or a sequence provided in FIGS. 3-19). In certain embodiments, a functional fragment comprises a truncation of about 20 bases at the 5′ end, the 3′ end, or both the 5′ and 3′ ends of any one of SEQ ID NOs: 25-106 or a sequence provided in FIGS. 3-19 or a variant thereof (e.g., a variant having at least 85%, 90%, 95%, 0) 96%, 97%, 98%, 99%, or 100% identity to any one of SEQ ID NOs: 25-106 or a sequence provided in FIGS. 3-19). In certain embodiments, a functional fragment comprises a truncation of about 25 bases at the 5′ end, the 3′ end, or both the 5′ and 3′ ends of any one of SEQ ID NOs: 25-106 or a sequence provided in FIGS. 3-19 or a variant thereof (e.g., a variant having at least 85%, 90%, 95%, 96%, 97%, 98%, 99%, or 100% identity to any one of SEQ ID NOs: 25-106 or a sequence provided in FIGS. 3-19). In certain embodiments, a functional fragment comprises a truncation of about 30 bases at the 5′ end, the 3′ end, or both the 5′ and 3′ ends of any one of SEQ ID NOs: 25-106 or a sequence provided in FIGS. 3-19 or a variant thereof (e.g., a variant having at least 85%, 90%, 95%, 96%, 97%, 98%, 99%, or 100% identity to any one of SEQ ID NOs: 25-106 or a sequence provided in FIGS. 3-19). In certain embodiments, a functional fragment comprises a truncation of about 35 bases at the 5′ end, the 3′ end, or both the 5′ and 3′ ends of any one of SEQ ID NOs: 25-106 or a sequence provided in FIGS. 3-19 or a variant thereof (e.g., a variant having at least 85%, 90%, 95%, 96%, 97%, 98%, 99%, or 100% identity to any one of any one of SEQ ID NOs: 25-106 or a sequence provided in FIGS. 3-19). In certain embodiments, a functional fragment comprises a truncation of about 40 bases at the 5′ end, the 3′ end, or both the 5′ and 3′ ends of any one of SEQ ID NOs: 25-106 or a sequence provided in FIGS. 3-19 or a variant thereof (e.g., a variant having at least 85%, 90%, 95%, 96%, 97%, 98%, 99%, or 100% identity to any one of SEQ ID NOs: 25-106 or a sequence provided in FIGS. 3-19).

[0154] In certain embodiments, the functional fragment comprise at least a transcription factor binding site. Identification of transcription factor binding sites can be determined by consensus, or by using a differential distance matrix or multidimensional scaling (De Bleser P. et al. (2007) Genome Biol 8(5):R83.

[0155] In certain embodiments, the promoter comprises a TATA mutation. In certain embodiments, the TATA mutation is a TATAA→TCGAA mutation.

[0156] In certain embodiments, a nucleic acid comprising a promoter described herein further comprises a 5′UTR including at least a portion of a beta-globin 5′UTR sequence or a Kozak sequence. In certain embodiments, the 5′UTR includes the nucleotide sequence 5′-GCCGCCACC-3′ (SEQ ID NO: 256), or a 6 bp, a 7 bp, or an 8 bp fragment thereof. In certain embodiments, the 6 bp fragment is 5′-GCCACC-3′ (SEQ ID NO: 257).

[0157] In certain embodiments, a nucleic acid comprising a promoter described herein further comprises a terminator sequence. In certain embodiments, the terminator sequence comprises one of the terminator sequences in TABLE 4.

TABLE 4

| | |
|---|---|
| a synthetic | AATAAAATATCTTTATTTTCATTAC |
| poly(A) | ATCTGTGTGTTGGTTTTTTGTGTG |
| sequence (SPA) | (SEQ ID NO: 258) |
| SPA and Pause | AATAAAATATCTTTATTTTCATTAC |
| | ATCTGTGTGTTGGTTTTTTGTGTGA |
| | ATCGATAGTACTAACATACGCTCTC |
| | CATCAAAACAAAACGAAACAAAACA |
| | AACTAGCAAAATAGGCTGTCCCCAG |
| | TGCAAGTGCAGGTGCCAGAACATTT |
| | CTCT (SEQ ID NO: 259); |
| SV40 (240bp) | ATCTAGATAACTGATCATAATCAGC |
| | CATACCACATTTGTAGAGGTTTTAC |
| | TTGCTTTAAAAAACCTCCCACACCT |
| | CCCCCTGAACCTGAAACATAAAATG |
| | AATGCAATTGTTGTTGTTAACTTGT |
| | TTATTGCAGCTTATAATGGTTACAA |
| | ATAAAGCAATAGCATCACAAATTTC |
| | ACAAATAAAGCATTTTTTTCACTGC |
| | ATTCTAGTTGTGGTTTGTCCAAACT |
| | CATCAATGTATCTTA |
| | (SEQ ID NO: 260) |
| SV 40-mini | TTGTTTATTGCAGCTTATAATGGTT |
| (120bp) | ACAAATAAAGCAATAGCATCACAAA |
| | TTTCACAAATAAAGCATTTTTTTCA |
| | CTGCATTCTAGTTGTGGTTTGTCCA |
| | AACTCATCAATGTATCTTAT |
| | (SEQ ID NO: 261) |
| bGH poly A | CGACTGTGCCTTCTAGTTGCCAGCC |
| | ATCTGTTGTTTGCCCCTCCCCCGTG |
| | CCTTCCTTGACCCTGGAAGGTGCCA |
| | CTCCCACTGTCCTTTCCTAATAAAA |
| | TGAGGAAATTGCATCGCATTGTCTG |
| | AGTAGGTGTCATTCTATTCTGGGGG |
| | GTGGGGTGGGGCAGGACAGCAAGGG |
| | GGAGGATTGGGAAGACAATAGCAGG |
| | CATGCTGGGGATGCGGTGGGCTCTA |
| | TGG (SEQ ID NO: 262) |
| TKpoly A | GGGGGAGGCTAACTGAAACACGGAA |
| | GGAGACAATACCGGAAGGAACCCGC |
| | GCTATGACGGCAATAAAAAGACAGA |
| | ATAAAACGCACGGGTGTTGGGTCGT |
| | TTGTTCATAAACGCGGGGTTCGGTC |
| | CCAGGGCTGGCACTCTGTCGATACC |
| | CCACCGAGACCCCATTGGGGCCAAT |
| | ACGCCCGCGTTTCTTCCTTTTCCCC |
| | ACCCCACCCCCCAAGTTCGGGTGAA |
| | GGCCCAGGGCTCGCAGCCAACGTCG |
| | GGGCGGCAGGCCCTGCCATAG |
| | (SEQ ID NO: 263) |
| sNRP1 | GGTATCAAATAAAATACGAAATGTG |
| | ACAGATT (SEQ ID NO: 264) |
| sNRP1a | AAATAAAATACGAAATGTGACAGAT |
| | T (SEQ ID NO: 265) |
| Histone H4B | GGTTGCTGATTTCTCCACAGCTTGC |
| | ATTTCTGAACCAAAGGCCCTTTTCA |
| | GGGCCGCCCAACTAAACAAAAGAAG |
| | AGCTGTATCCATTAAGTCAAGAAGC |
| | (SEQ ID NO: 266) |
| MALAT-1 | GATTCGTCAGTAGGGTTGTAAAGGT |
| | TTTTCTTTTCCTGAGAAAACAACCT |
| | TTTGTTTTCTCAGGTTTTGCTTTTT |
| | GGCCTTTCCCTAGCTTTAAAAAAAA |
| | AAAAGCAAAAGACGCTGGTGGCTGG |
| | CACTCCTGGTTTCCAGGACGGGGTT |
| | CAAGTCCCTGCGGTGTCTTTGCTT |
| | (SEQ ID NO: 267) |
| MALAT-comp14 | AAAGGTTTTTCTTTTCCTGAGAAAT |
| | TTCTCAGGTTTTGCTTTTTAAAAAA |
| | AAAGCAAAAGACGCTGGTGGCTGGC |
| | ACTCCTGGTTTCCAGGACGGGGTTC |
| | AAGTCCCTGCGGTGTCTTTGCTT |
| | (SEQ ID NO: 268) |

[0158] In certain embodiments, the compact promoter is coupled with a viral intron (e.g., an SV40i intron, a MVM intron, a Mv2 intron, an HNRNPH1 intron, chimeric introns or synthetic introns.).

[0159] In certain embodiments, the compact promoter does not comprise a viral promoter and/or a synthetic promoter.

[0160] In certain embodiments, the compact promoter comprises at least 95%, 98%, 99%, 99.5% or 100% identity to a naturally-occurring mammalian promoter. In certain embodiments, the compact promoter comprises at least 95%, 98%, 99%, 99.5% or 100% identity to a naturally-occurring human promoter.

[0161] The expression level of a compact promoter can be determined by expressing a reporter molecule in a cell, e.g., a human embryonic kidney (HEK) cell line or an N2A cell line. In certain embodiments, the compact promoter is capable of expressing a luciferase reporter at a higher level than is a HSK thymidine kinase (TK) promoter.

### Artiodactyla H1 Promoters

[0162] In certain embodiments, the promoter comprises an Artiodactyla H1 promoter. An alignment of Artiodactyla H1 promoter sequences is provided in FIG. 5 (wherein sequences numbered 1-200 in FIG. 5 correspond to SEQ ID NOs: 269-468 and consensus/100%, consensus/90%, consensus/80% and consensus/70% correspond to SEQ ID NOs 1811-1814, respectively). In some embodiments, the promoter comprises a nucleotide sequence having at least 85%. 90%, 95%. 96%, 97%. 98%. 99%, or 100% identity to nucleotides 20-266 of any one of the sequences in FIG. 5 or a functional fragment or variant (e.g., codon optimized) thereof.

[0163] In certain embodiments, the Artiodactyla H1 promoter comprises a sequence selected from the sequences in TABLE 5:

TABLE 5

| | |
|---|---|
| Artiodactyl | TGAGCTTCCCKCCGCCCTAYGSMRA |
| Alignment | AMAMYRSSCKCAARSMGCATTTATA |
| consensus | AKGMKCYCAWACCTARAGMCAYTTK |
| sequence | WCGGTTAYGGTGACTTCCCAYAASA |
| 75%_Identity | CATTGCGACATGCAAATAYTDYRGW |
| | GCGTYCCKCCCCTGGYARYTCCWCG |
| | CTRGGACGCACRCGCRCTACGNGTT |
| | CCCGCCTTTWGACTGCGCYGGCGAT |
| | TCCWGGGAGMGGRYTGATGACGTCA |
| | GCGTTCGGGMTCCATGGCG |
| | (SEQ ID NO: 469) |
| Artiodactyl | TGAGCTTCCCKCCGCCCTAYGBMRR |
| Alignment | AVRVYDSSYKCARDSMRCAYTTATA |
| consensus | ADGHKCYCADAMSTARAKMSAYTTB |
| sequence | WCRSTTAYGGTGACTTCYCRYAASA |
| 85%_Identity | CATTGSGAYATGCAAATAYTDYRGW |
| | GCGTYNNNCCKCSCCTGGNYARYTY |
| | YWCGCYRGGACGCACRCGCRCTRCG |
| | NGYTCCCGCCTTTWGACTGCGCYGG |
| | CGATWCYWGGGAGMGGRYTGATGAC |
| | GTCARYGTTSKGGMTCCATGGCG |
| | (SEQ ID NO: 470) |
| Artiodactyl | TGAGCTTCCCKCCGCCCYAYRBVRR |
| Alignment | ANRVYDVVYKCWRDBMRCRYTTATA |
| consensus | ANRHKCYCADAMSTARAKHSAYTTB |
| sequence | WYRSTTAYGGTGACTTCYCRYAASA |
| 90%_Identity | CAKTGSGRYATGCAAATAYTDYRGH |
| | GYGYHNNNCCBCSYCYGGNNNNNYA |
| | RYTYYDCKCYRGGACGYRCRCGCRM |
| | TRCRNGYTCCCGCCTWKWGACTGCG |
| | CYGGCGATWCYWRSGAGMKGRYTGA |
| | TGACGTCARYGTTSKGGMTCCATGG |
| | CG |
| | (SEQ ID NO: 471) |
| Artiodactyl | TGAGCTTCYCKCCGCCCYAYRNNRR |
| Alignment | RNRNBDVVBBCWVNBMRYVYTTATA |
| consensus | ANRHKCBCADAVBKARRKHVAYTTB |
| sequence | WYRVTTAYGGYGAYTTCYCNRHAMS |
| 95%_Identity | RCAKWGSRRYATGCAAATAYKDYRG |
| | HNNNNNNGYRYHNNNCCBSBYCYRK |
| | NNNNNNYADBTYYDCKNCYRGGACG |
| | YRSRCGCRMTRCRNGYTCCCGCCYW |
| | KWGACTGCGCYSGCNGATWMYHRNG |
| | ARVKGRYTGATGACGTCRRYRTTVK |
| | GGHTCCATGGCG |
| | (SEQ ID NO: 472) |
| Artiodactyl | TGAGCTTCYCDCCGCCCYRYVNNVR |
| Alignment | NNNNBNNNNNBDVNNHRYVYTTATA |
| consensus | ANRNDCBSRNRNBBNVRKNNAYNNN |
| sequence | HHRVTTAYGGYGAYTYCYCNRHAMS |
| 99% Identity | VMABWGSRRBATGYAAATAYBNYRG |
| | HNNNNNNRBRYHNNNCCBSBYCHDD |
| | NNNNNNHMDBKYYDHNNNNNGKACR |
| | YRNRCRYVVBNYRNSYTCCSGCCYW |
| | KDNNGAYBGHRCHVGYNGRYWMYNR |
| | NGARVKRVYTGATGACGYMRVYRHK |
| | VNGRHWCCATGGCG |
| | (SEQ ID NO: 473) |
| Artiodactyl | TGAGCTYCYCDCCGCCYYRHNNNNN |
| Alignment | NNNNNNNNNNBNNNNNNVNNNRYNN |
| consensus | TWATAWNRNDCBSRNVNNBNVRBNN |
| sequence | AYNNNHHVNYTAYGGYGAYTYCYCN |
| 100%_Identity | RHAMSVVABWGSRNRBATGYAAATN |
| | NBNHRNHNNNNNNRBRBHNNNCSNN |
| | BYYNDDNNNNNNNMDBBYBNNNNNN |
| | NRDRCVBRNRMRYVNNNHRNVHYCC |
| | SRCCYHKDNNNGVYBBHNSNNSYNG |
| | RBDMYNRNGADVNNRVYYRRTGACR |
| | YMRVYDHBNNRRHDCBATGGCG |
| | (SEQ ID NO: 474) |

[0164] In some embodiments, the promoter comprises a nucleotide sequence having at least 85%, 90%, 95%, 96%, 97%, 98%, 99%, or 100% identity to nucleotides 20-238 of any one of SEQ ID NOs: 469-474 or a functional fragment or variant (e.g., codon optimized) thereof.

### Carnivora H1 Promoters

[0165] In certain embodiments, the promoter comprises a Carnivora H1 promoter. An alignment of Carnivora H1 promoter sequences is provided in FIG. 6 (wherein sequences numbered 1-86 in FIG. 6 correspond to SEQ ID NOs: 475-558 and SEQ ID NOs: 1809-1810, and consensus/100%, consensus/90%, consensus/80% and consensus/70% correspond to SEQ ID NOs: 1815-1818, respectively). In some embodiments, the promoter comprises a nucleotide sequence having at least 85%, 90%, 95%, 96%, 97%, 98%, 99%, or 100% identity to nucleotides 20 to 253 any one of the sequences in FIG. 6 or a functional fragment or variant (e.g., codon optimized) thereof.

[0166] In certain embodiments, the Carnivora H1 promoter comprises a sequence selected from those in TABLE 6.

TABLE 6

| | |
|---|---|
| Carnivora | TGAGCTTCCCTCCGCCCTATGGGGA |
| Alignment | AAGGGTGGMCCCRSMGAGCATTTAT |
| consensus | AAGGCTCCCRYAYCTAAAGRCATTT |
| sequence | YWCAGTTATGGTGACTTCCCACAAA |
| 75%_Identity | YRCRYAGCAACATGCAAATATCGHG |
| | GRGWGTACCKCCCCTGTCCYWTGYA |
| | SRCGTCTTTCTCWSSASGCACGCAC |
| | GCGCGCTGTGTTCCCCGCCYTGTGA |
| | CTCYAGGCGGGYRWTTCCWGGGRSR |
| | GGKTTGMTGACRKSMAMGTTCWGGC |
| | TYCATGGCG (SEQ ID NO: 559) |
| Carnivora | TGAGCTTCCCTCCGCCCTATGGGGA |
| Alignment | AAVGGYGGHYCYRVMGAGSATTTAT |
| consensus | AAGRCTCCCRYAYCTAAAKRCATTT |
| sequence | HWCAGTTATGGTGACTTCCCACAAA |
| 85%_Identity | YRCRYAGCAACATGCAAATATCGHG |
| | GRGWGTACCKCCCCTGTCCYWTGYA |
| | SRYGTCTTTCTCWSSASGCACGCAC |
| | GCGCGCTGTRTTCCCCGCCYTGTGA |
| | CTCYAGGCGGGYRWTTCCHGGGRSR |
| | GGBTTGMTGACRKSMAMGTTCWGGC |
| | TYCATGGCG (SEQ ID NO: 560) |
| Carnivora | TGAGCTTCCCTCCGCCCTAYGGGGA |
| Alignment | AAVRGYGGHYCYRVVGMGSAYTTAT |
| consensus | AAGRCTCCCDYAYCTAAAKRCATTT |
| sequence | HWCAGTTATGGTGAYTTCCCACAAA |
| 90% Identity | YRCRYAGCAACATGCAAATATMGHR |
| | GRGWGTACCKCCCCTGTCCYWTGYA |
| | SRYGKCTTTCTCWSSASGCACGCAC |
| | GCGCKCTGTRTTCCCCGCCYTGTGA |
| | CTCYAGGYGGGYRWTTCYHGGGRSR |
| | GGBTTGMTGACRDSMAMGTTCWGRC |
| | TYCATGGCG (SEQ ID NO: 561) |
| Carnivora | TGAGCTTCCCTCCGCCCTAYGRRRV |
| Alignment | RAVRGHVRNYCYRVVGMGVAYTTAT |
| consensus | AARRCYCCMDYAHCTAAAKRCATTT |
| sequence | HWCARTYAYGGTGAYTTCCCACAAA |
| 95%_Identity | YRCRYAGCAACATGCAAATWTMGHR |
| | RRGWGTACCKCCCCTGTCCYWTGYA |
| | SRYGKCTWTCTMDBSRSGCACGCAC |
| | GCGCKCTGTRTTCCCCGCCYTRTGA |
| | CTCYARGHGGRYRDTTCYHGGRRSR |
| | GKBTTGMTGACRDSMAMGTTCHGRC |
| | TYCATGGCG (SEQ ID NO: 562) |
| Carnivora | TGAGCTTCCCTCCGCCCKAYGRVRV |
| Alignment | RAVDVNNNNNBBRVNVMVNRYTTAT |
| consensus | AARRCYYYHNYRHSTRAWBVCATTW |
| sequence | NWCRRTYRYGGTGAYTTCCCDCAAA |
| 99%_Identity | NRCRYMGCAAYATGYAAAYWYMKHR |
| | RRGHGHRYYDCCYCDRTCBYWHVYM |
| | VRHRBCTNTYTHNNSRNGCACGCAC |
| | GCRSDCTRYRTTCCCCGCCYTRTGA |
| | CTCNRRSHRGRYDDTDCYHRGVRSR |
| | VKBTTGVYGMCRNSVRVBTYCHGRY |
| | KYCATGGCG (SEQ ID NO: 563) |
| Carnivora | TGAGCTTCCCTCCGCCCKAYGRVRV |
| Alignment | RAVDVNNNNNBBRVNVMVNRYTTAT |
| consensus | AARRCYYYHNYRHSTRAWBVCATTW |
| sequence | NWCRRTYRYGGTGAYTTCCCDCAAA |
| 100%_Identity | NRCRYMGCAAYATGYAAAYWYMKHR |
| | RRGHGHRYYDCCYCDRTCBYWHVYM |
| | VRHRBCTNTYTHNNSRNGCACGCAC |
| | GCRSDCTRYRTTCCCCGCCYTRTGA |
| | CTCNRRSHRGRYDDTDCYHRGVRSR |
| | VKBTTGVYGMCRNSVRVBTYCHGRY |
| | KYCATGGCG (SEQ ID NO: 564) |

[0167] In some embodiments, the promoter comprises a nucleotide sequence having at least 85%, 90%, 95%, 96%, 97%, 98%, 99%, or 100% identity to nucleotides 20-253 of any one of SEQ ID NOs: 559-564 or a functional fragment or variant (e.g., codon optimized) thereof.

### Cetacea H1 Promoters

[0168] In certain embodiments, the promoter comprises a Cetacea H1 promoter. An alignment of Cetacea H1 promoter sequences is provided in FIG. 7 (wherein sequences numbered 1-44 in FIG. 7 correspond to SEQ ID NOs: 565-608, and consensus/100%, consensus/90%, consensus/80% and consensus/70% correspond to SEQ ID NOs: 1819-1822, respectively). In some embodiments, the promoter comprises a nucleotide sequence having at least 85%, 90%, 95%, 96%, 97%, 98%, 99%, or 100% identity to nucleotides 20-241 of any one of the sequences in FIG. 7 or a functional fragment or variant (e.g., codon optimized) thereof.

[0169] In certain embodiments, the Cetacea H1 promoter comprises a sequence selected from those in TABLE 7.

TABLE 7

| | |
|---|---|
| Cetacea | TGAGCTTCCCKCCGCCCTAYGCCGA |
| Alignment | AARYYWRGCTCAASCCRCATTTATA |
| consensus | AGGCTCCCAAAYCTAARKACATTTG |
| sequence | TCGGTTATGGTGACTTCCCGCAACA |
| 75%_Identity | CATTGCGACATGCAAATACTGCGGA |
| | GCGTWCCTCCCCTGGCAACTCCTCG |
| | CTGGGACGCACGCGCGCTACGTGCT |
| | CCCGCCTTTTGACTGCGCCGGCGAT |
| | ACTTGGGAGAGGGTTGATGACGTCA |
| | GCGTTCTGGCTCCATGGC |
| | (SEQ ID NO: 609) |
| Cetacea | TGAGCTTCCCKCCGCCCTAYRCYGA |
| Alignment | AARNYWRSYTCAASSYRCATTTATA |
| consensus | ARGCTCSCAAAYCKAARKACATTTG |
| sequence | TCGGTTATGGTGACTTCCCGCAMCA |
| 85%_Identity | CATTGCGACATGCAAATACTGCGGA |
| | GYGYHCCTCCCCTGGCAACTCCTCG |
| | CTGGGACGCACGCGCRCTRCGTGCT |
| | CCCGCCTTTTGACTGCGCCGGCGAT |
| | ACTTGGGAGAGGGTTGATGACGTCA |
| | GCGTTCTGGCTCCATGGC |
| | (SEQ ID NO: 610) |
| Cetacea | TGAGCTTCCCDCCGCCCTAYRMYRA |
| Alignment | AARNYDRSYKCAAVSYRCATTTATA |
| consensus | ARGCTCSCAARBCKAARKACATTTG |
| sequence | TMGGTTATGGTGACTTCCCGCAMCA |
| 90%_Identity | CATTGCGACATGCAAATACTGCGGA |
| | GYGYHCCTCCCCTGGCAACTCCTCG |
| | CTGGGACGCACGCGCRCTRCGTGCT |
| | CCCGCCTTTTGACTGCGCCGGCGAT |
| | ACTTGGGAGAGGGTTGATGACGTCA |
| | GCGTTCTGGCTCCATGGC |
| | (SEQ ID NO: 611) |
| Cetacea | TGAGCTTCCCDCCGCCCTAYRHBRA |
| Alignment | AARNBDVVYKYVVVBYRYMNTTATA |
| consensus | ARGCTCBCAARBCKAARKRCATTTS |
| sequence | WMGSTTATGGTGACTTCCCGYAMCA |
| 95%_Identity | CATTGCGACATGCAAATACTGCGGA |
| | GYGYHCCTCCCCWGGCAACTCCTCG |
| | CTGGGACGCAMGCGCRCTRCGTGCT |
| | CCCGCCTTTKGACTGMGCCGGCGAY |
| | ACYTGGGAGAGRGTTGATGACGTCA |
| | GCGTTCTGGCTCCATGGC |
| | (SEQ ID NO: 612) |
| Cetacea | TGAGCTTCYCDCCGCCCTRYDNBVR |
| Alignment | ARVNBNNNBKYVVNNNRYVNTTATA |
| consensus | ARGCTCBCAMVBCKAARKRYATTTS |
| sequence | HMVNTTATGGTGACTTCCCGYAMCR |
| 99%_Identity | CATTGCGACATGCAAATNNTGMGGA |
| | GYGYHNNNCCYCYYCWRRMAACTCC |
| | TMGCYGGGACGCAMGCGYRYTDCRT |
| | SMTCCCGCCTYTKGRCYGMRCSSGC |
| | GRYRCYTGGGAKARRGTTGATGACR |
| | YCASCRTTCTGGCTCCATGGC |
| | (SEQ ID NO: 613) |
| Cetacea | TGAGCTTCYCDCCGCCCTRYDNBVR |
| Alignment | ARVNBNNNBKYVVNNNRYVNTTATA |
| consensus | ARGCTCBCAMVBCKAARKRYATTTS |
| sequence | HMVNTTATGGTGACTTCCCGYAMCR |
| 100%_Identity | CATTGCGACATGCAAATNNTGMGGA |
| | GYGYHNNNCCYCYYCWRRMAACTCC |
| | TMGCYGGGACGCAMGCGYRYTDCRT |
| | SMTCCCGCCTYTKGRCYGMRCSSGC |
| | GRYRCYTGGGAKARRGTTGATGACR |
| | YCASCRTTCTGGCTCCATGGC |
| | (SEQ ID NO: 614) |

[0170] In some embodiments, the promoter comprises a nucleotide sequence having at least 85%, 90%, 95%, 96%, 97%, 98%, 99%, or 100% identity to nucleotides 20-238 of any one of SEQ ID NOs: 609-614 or a functional fragment or variant (e.g., codon optimized) thereof.

### Chiroptera H1 Promoters

[0171] In certain embodiments, the promoter comprises a Chiroptera H1 promoter. An alignment of Chiroptera H1 promoter sequences is provided in FIG. 8 (wherein sequences numbered 1-57 in FIG. 8 correspond to SEQ ID NOs: 615-671, and consensus/100%, consensus/90%, consensus/80% and consensus/70% correspond to SEQ ID NOs: 1823-1826, respectively). In some embodiments, the promoter comprises a nucleotide sequence having at least 85%, 90%, 95%, 96%, 97%, 98%, 99%, or 100% identity to nucleotides 20-276 of any one of the sequences in FIG. 8 or a functional fragment or variant (e.g., codon optimized) thereof.

[0172] In certain embodiments, the Chiroptera H1 promoter comprises a sequence selected from those in TABLE 8.

TABLE 8

| | |
|---|---|
| Chiroptera | TGAGCTTCCCTCCGCCCTNBGRGRR |
| Alignment | RRRVVBBYYWSNYGSMRRMTATATA |
| consensus | AGGNYCCCWYWYCTVWAGRCMTTTY |
| sequence | AMGRTTASGGTGAYTTCCCACAAYA |
| 75% Identity | CATAGCGACATGCAAATRWNGHNGG |
| | GYGTGCCTYCMCKGTCCYTNGYSGR |
| | CRDCKTCTYKCYVGKAMGNNNNNNC |
| | GCGCTGMGTRTTCCCGCCTTKTGAC |
| | NNYARVYKRGCGARTCCKGGGAGRG |
| | GRYWGWTGACGTCAACAKTCVGGCT |
| | CCATGGCG (SEQ ID NO: 673) |
| Chiroptera | TGAGCTTCCCTCCGCCCTNBRVGDR |
| Alignment | RRDVVNNNBBBBDBNBGSVRRHTAT |
| consensus | ATRAGRNNCCYDYWYSKVWAGRCMT |
| sequence | TTYWHRRKTASGGTGAYTTCCCACA |
| 85% Identity | AYRCATAGCGACATGYAAATDHNNH |
| | NRGGYRTGCYTYCHCKGKCCYYNGY |
| | NRRMRNCDYCTYKNYNNNNMGNNNN |
| | NNSGNNCTGHGHRTTCCCGCCTTBT |
| | GRCNNYRRVYBRGCGARTNCDGGGA |
| | RRRGRYWGDTKAYGTCRNNNNNNNN |
| | NACWKTYVSGCTCSATGGCG |
| | (SEQ ID NO: 674) |
| Chiroptera | TGAGCTTCNCTCCGCCCTNBRVRDR |
| Alignment | RRDNNNNNNBBBDBNBVVVRRHTAT |
| consensus | ATRAGRNNCCYDBHYSKVDRGDYMT |
| sequence | TTHWHRRKKABGGTGAYTTCCCACA |
| 90%_Identity | AYRCAHAGCGACATGYAAATDHNNN |
| | NRGRYRTGYYTYCHCBGKCCYYNGY |
| | NRDMNNYDYNNNKNNNNNNMNNNNN |
| | NNSNNNSYGNBHDWTCCCGCCTTBN |
| | GRNNNYRNVBBRGCGARTNCDGGGA |
| | RVRRRYDGDTKAYGTVRNNNNNNNN |
| | NRYWBWBVSGCWYSATGGCG |
| | (SEQ ID NO: 675) |
| Chiroptera | TGAGCTTCNCTCCGCCCTNBRVRDR |
| Alignment | RDNNNNNNNNNNNBNNVVVVRNTAT |
| consensus | ATRAGRNNCCHDNNHBKVDDRDHMT |
| sequence | TTHNHRVDKABRGYRAYTTCCCAYA |
| 95%_Identity | AYRCMHRGCRAYATGYAAATDNNNN |
| | NRRDBDYGYYKBYNBNSNYYYBNNN |
| | NNNHNNNNNNNNNNNNNNNNNNNNN |
| | NNNNNNSNNNBHDNTCCCGCCTYNN |
| | NNNNNNNNVBNDRCRARTNCNRGGA |
| | RVRRRNDGNTKAYGYVRNNNNNNNN |
| | NRYWBHBNBGCDYNATGGCG |
| | (SEQ ID NO: 676) |
| Chiroptera | TGAGCTTCNCKCCGCCCYNNRVVNV |
| Alignment | VNNNNNNNNNNNNNNNVNNVVNTWW |
| consensus | AKVWRVNNNBYHNNNNBDNNNDNHM |
| sequence | YYTHNNVVNKABDGYRAYNTTCCCA |
| 99%_Identity | YRRBRCHHVGCRAYAYGYAAAWDNN |
| | NNNNDDBDYSYBNBYNNNNNBNNBN |
| | NNNNNNNNNNNNNNNNNNNNNNNNN |
| | NNNNNNNNNNNNNNNNNNNTYYYGB |
| | YHNNNNNNNNNNNNNNNNDRNDRVK |
| | NYNRGGRRVRVNNNNNNGNTBWYGH |
| | NNVNNNNNNNNNVYDNNNNNNNNYN |
| | ATGGCG (SEQ ID NO: 677) |
| Chiroptera | NVVNKABDGYRAYNTTCCCAYRRBR |
| Alignment | CHHVGCRAYAYGYAAAWDNNNNNND |
| consensus | DBDYSYBNBYNNNNNBNNBNNNNNN |
| sequence | NNNNNNNNNNNNNNNNNNNNNNNNN |
| 100%_Identity | NNNNNNNNNNNNNNTYYYGBYHNNN |
| | NNNNNNNNNNNNNDRNDRVKNYNRG |
| | GRRVRVNNNNNNGNTBWYGHNNVNN |
| | NNNNNNNVYDNNNNNNNNYNATGGC |
| | G(SEQ ID NO: 678) |

[0173] In some embodiments, the promoter comprises a nucleotide sequence having at least 85%, 90%, 95%, 96%, 97%, 98%, 99%, or 100% identity to nucleotides 20-253 of any one of SEQ ID NOs: 673-678 or a functional fragment or variant (e.g., codon optimized) thereof.

### Dermoptera H1 Promoters

[0174] In certain embodiments, the promoter comprises a Dermoptera H1 promoter. An alignment of Dermoptera H1 promoter sequences is provided in FIG. 9 (wherein sequences numbered 1-2 in FIG. 9 correspond to SEQ ID NOs: 679 and 680, and consensus/100%, consensus/90%, consensus/80% and consensus/70% correspond to SEQ ID NOs: 1827-1830, respectively). In some embodiments, the promoter comprises a nucleotide sequence having at least 85%, 90%, 95%, 96%, 97%, 98%, 99%, or 100% identity to nucleotides 20-227 of any one of the sequences in FIG. 9 or a functional fragment or variant (e.g., codon optimized) thereof.

[0175] In certain embodiments, the Dermoptera H1 promoter comprises

TGAGCTTCCCTCCGCCCTACCCCCCAAGTGGSCCACAGG
CGGTATTTATAAGGCTTACAGCCCTAAAGACATTTACCA
TTATGGTGACTTCCCATAATACATAGCGACATGCAAAAT
TGAGGGGCGTGCCAGACGGGCGTCGTCTCTCCGAAGCGC
ACGCGCGCTGCGTGTTCCCGCCGCGTGACACGGCCCGCG
ATTCCTGAGAGCGAGTTGGTGACGTGAACCCATGGC
(SEQ ID NO: 681; Dermoptera Alignment
consensus sequence 100%_Identity)

[0176] In some embodiments, the promoter comprises a nucleotide sequence having at least 85%, 90%, 95%, 96%, 97%, 98%, 99%, or 100% identity to nucleotides 20-227 of SEQ ID NO: 681 or a functional fragment or variant (e.g., codon optimized) thereof.

### Hyracoidae H1 Promoters

[0177] In certain embodiments, the promoter comprises an Hyracoidae H1 promoter. An alignment of Hyracoidae H1 promoter sequences is provided in FIG. 10 (wherein sequences numbered 1-2 in FIG. 10 correspond to SEQ ID NOs: 682 and 683, and consensus/100%, consensus/90%, consensus/80% and consensus/70% correspond to SEQ ID NOs: 1831-1834, respectively). In some embodiments, the promoter comprises a nucleotide sequence having at least 85%, 90%, 95%, 96%, 97%, 98%, 99%, or 100% identity to nucleotides 20-259 of any one of the sequences in FIG. 10 or a functional fragment or variant (e.g., codon optimized) thereof.

### Insectavora H1 Promoters

[0178] In certain embodiments, the promoter comprises an Insectavora H1 promoter. An alignment of Insectavora H1 promoter sequences is provided in FIG. 11 (wherein sequences numbered 1-8 in FIG. 11 correspond to SEQ ID NOs: 684-691, and consensus/100%, consensus/90%, consensus/80% and consensus/70% correspond to SEQ ID NOs: 1835-1838, respectively). In some embodiments, the promoter comprises a nucleotide sequence having at least 85%, 90%, 95%, 96%, 97%, 98%, 99%, or 100% identity to nucleotides 20-279 of any one of the sequences in FIG. 11 or a functional fragment or variant (e.g., codon optimized) thereof.

[0179] In certain embodiments, the Insectavora H1 promoter comprises a sequence selected from those in TABLE 9.

TABLE 9

| | |
|---|---|
| Insectavora | TGAGCTTCCCTCCGCCCTAYCRGCG |
| Alignment | TAAAVSRRBKCKTASMWMRRAYTTA |
| consensus | TAAGGMYCYCWTASYTHWRGMYRTW |
| sequence | TYWYDGTTAGGGTGACTTCCCACAA |
| 75%_Identity | KMCATAGCGAYATGYAAATATRRVG |
| | GSGCGKGTYTCYCCKVGGTCYYHGY |
| | YYWGKMGGCGKCWTCTYHCSARGWC |
| | GCARGCGCRYTGMKCGCCYGTTCCC |
| | GCCCKGTCAMYMYWGVYCTGTCACT |
| | ATTGTCATTCCSRBCWTTCYSGGVS |
| | VMKKYTRATGACGTCARCRYYTMGK |
| | YTCCATGGCG |
| | (SEQ ID NO: 692) |
| Insectavora | TGAGCTTCCCTCCGCCCTAYCRGCS |
| Alignment | TAAAVVVNBKCKTWSMWMRNAYTTA |
| consensus | TAAGGMYCNCWKABYTHWRGMYRYW |
| sequence | TYWYDGTTAGGGTRACTTCCCACRA |
| 85%_Identity | KVCAYAGCGRYATGYAAATABRRVG |
| | SSGYKDGYYYVYCCNVGGTCYYHGB |
| | YYWRKVKGCRKSDTCTYHCSARGWC |
| | GCVNGCGCRYTGMKCGCCNSTTCCC |
| | GCMMBGTYAMYMYWGVYSTGTCACT |
| | ATTGTCATTCCSVBCWTTCYSGGVS |
| | VMKKYTRATGACBTCARCRYYYMRN |
| | YTMCATGGCG |
| | (SEQ ID NO: 693) |
| Insectavora | TGAGCTTCCCTCCGCCCTAYCRGCS |
| Alignment | YARRVVVNNBCKYWBVDVVNMYTTA |
| consensus | TAAGGMBCNCHKRBBYNHVGMYVYW |
| sequence | KHWBDSTTAGGGTRACTTCCCAYRR |
| 90%_Identity | KVCRYRGCGRYATKYAAATABRRVG |
| | SSGYKDGYYYVBYCNVGGTCYYHGB |
| | YYWRKVKGCRKSDTCTBNYBRRRWC |
| | GCVNGYGCDBYGMDCGCCNSYTCCC |
| | GYMMBKTYMMYMYWGVYSTGTCACT |
| | ATTGTCATTCCSVBCWTYYYVGKVS |
| | NMKKYTRRTGACBTCWRCRYYYMRN |
| | YTMCATGGCG |
| | (SEQ ID NO: 694) |
| Insectavora | TGAGCTTCCCTCCGCCCTAYCRGCS |
| Alignment | YARRVVVNNBCKYWBVDVVNMYTTA |
| consensus | TAAGGMBCNCHKRBBYNHVGMYVYW |
| sequence | KHWBDSTTAGGGTRACTTCCCAYRR |
| 95% Identity | KVCRYRGCGRYATKYAAATABRRVG |
| | SSGYKDGYYYVBYCNVGGTCYYHGB |
| | YYWRKVKGCRKSDTCTBNYBRRRWC |
| | GCVNGYGCDBYGMDCGCCNSYTCCC |
| | GYMMBKTYMMYMYWGVYSTGTCACT |
| | ATTGTCATTCCSVBCWTYYYVGKVS |
| | NMKKYTRRTGACBTCWRCRYYYMRN |
| | YTMCATGGCG |
| | (SEQ ID NO: 695) |
| Insectavora | TGAGCTTCCCTCCGCCCTAYCRGCS |
| Alignment | YARRVVVNNBCKYWBVDVVNMYTTA |
| consensus | TAAGGMBCNCHKRBBYNHVGMYVYW |
| sequence | KHWBDSTTAGGGTRACTTCCCAYRR |
| 99%_Identity | KVCRYRGCGRYATKYAAATABRRVG |
| | SSGYKDGYYYVBYCNVGGTCYYHGB |
| | YYWRKVKGCRKSDTCTBNYBRRRWC |
| | GCVNGYGCDBYGMDCGCCNSYTCCC |
| | GYMMBKTYMMYMYWGVYSTGTCACT |
| | ATTGTCATTCCSVBCWTYYYVGKVS |
| | NMKKYTRRTGACBTCWRCRYYYMRN |
| | YTMCATGGCG |
| | (SEQ ID NO: 696) |
| Insectavora | TGAGCTTCCCTCCGCCCTAYCRGCS |
| Alignment | YARRVVVNNBCKYWBVDVVNMYTTA |
| consensus | TAAGGMBCNCHKRBBYNHVGMYVYW |
| sequence | KHWBDSTTAGGGTRACTTCCCAYRR |
| 100%_Identity | KVCRYRGCGRYATKYAAATABRRVG |
| | SSGYKDGYYYVBYCNVGGTCYYHGB |
| | YYWRKVKGCRKSDTCTBNYBRRRWC |
| | GCVNGYGCDBYGMDCGCCNSYTCCC |
| | GYMMBKTYMMYMYWGVYSTGTCACT |
| | ATTGTCATTCCSVBCWTYYYVGKVS |
| | NMKKYTRRTGACBTCWRCRYYYMRN |
| | YTMCATGGCG |
| | (SEQ ID NO: 697) |

[0180] In some embodiments, the promoter comprises a nucleotide sequence having at least 85%, 90%, 95%, 96%, 97%, 98%, 99%, or 100% identity to nucleotides 20-278 of any one of SEQ ID NOs: 692-697 or a functional fragment or variant (e.g., codon optimized) thereof.

### Lagomorpha H1 Promoters

[0181] In certain embodiments, the promoter comprises a Lagomorpha H1 promoter. An alignment of Lagomorpha H1 promoter sequences is provided in FIG. 12 (wherein sequences numbered 1-8 in FIG. 12 correspond to SEQ ID NOs: 698-705, and consensus/100%, consensus/90%, consensus/80% and consensus/70% correspond to SEQ ID NOs: 1839-1842, respectively). In some embodiments, the promoter comprises a nucleotide sequence having at least 85%, 90%, 95%, 96%, 97%, 98%, 99%, or 100% identity to nucleotides 20-233 of any one of the sequences in FIG. 12 or a functional fragment or variant (e.g., codon optimized) thereof.

[0182] In certain embodiments, the Lagomorpha H1 promoter comprises a sequence selected from those in TABLE 10.

TABLE 10

| | |
|---|---|
| Lagomorpha | TGAGCTTCCTCCGCCCTATGGGGAG |
| Alignment | AGSTGGRYCCRADCAGACTTTATAA |
| consensus | AGCTCCGAAARCCCAAGGCATCTTT |
| sequence | CCCTTACGGTRGCTTCCCACAAGAC |
| 75%_Identity | ATAGCGACATGCAAATWTMTTGAHR |
| | HDKRCTTCACGACGCGCTTCTCGCC |
| | RCAGCGCAAGCGCGCTGTGTGCTGA |
| | CGCCSGGGRACGGGCCAGYGCGCGG |
| | TTCCCGGGAGCGGGTTGATGACGTT |
| | MGATCTCCATGGCG |
| | (SEQ ID NO: 706) |
| Lagomorpha | TGAGCTTCCTCCGCCCTATGGGGRR |
| Alignment | WGSTGGRYYCRADCAGMCTTTATAA |
| consensus | AGCTCCRAARRYYCAAGRCATYTTT |
| sequence | CCSTTACGGTRGCTTCCCACARKAC |
| 85% Identity | AYAGCGAYATGCAAATWKMTYGMHR |
| | HDNRVTTCRCGRMSCGCTTCYCGCC |
| | VCRGCGCARGCGCGCTGKGYGCTGW |
| | CKCCSSKGRACGSGCCRGBKCGCGR |
| | TTCCCGGGAGCKGGYTGATGACGTT |
| | MGRTCTCCATGGCG |
| | (SEQ ID NO: 707) |
| Lagomorpha | TGAGCTTCCTCCGCCCTAYGGGGRR |
| Alignment | WGSTGSRBYCRRDCAGMCTTTATAA |
| consensus | AGCTCCRAARRYYCRAGRCATYTTT |
| sequence | CYSTTACRGTRRYTTCCCACARKRC |
| 90% Identity | MYAGCGAYATGCAAATHKMTYGMHR |
| | HDNVVKTCRCGRMSCSCKTCYCGCY |
| | VCRGCGCARGCGCGCTGKRYGCTGW |
| | CKCCSSKRRACGSGCCRGBKCGCGR |
| | TTCCCGGGAGCKGGYTGATGACGTT |
| | MGRTCTCCATGGCG |
| | (SEQ ID NO: 708) |
| Lagomorpha | TGAGCTTCCTCCGCCCTAYGGGGRR |
| Alignment | WGSTGSRBYCRRDCAGMCTTTATAA |
| consensus | AGCTCCRAARRYYCRAGRCATYTTT |
| sequence | CYSTTACRGTRRYTTCCCACARKRC |
| 95%_Identity | MYAGCGAYATGCAAATHKMTYGMHR |
| | HDNVVKTCRCGRMSCSCKTCYCGCY |
| | VCRGCGCARGCGCGCTGKRYGCTGW |
| | CKCCSSKRRACGSGCCRGBKCGCGR |
| | TTCCCGGGAGCKGGYTGATGACGTT |
| | MGRTCTCCATGGCG |
| | (SEQ ID NO: 709) |
| Lagomorpha | TGAGCTTCCTCCGCCCTAYGGGGRR |
| Alignment | WGSTGSRBYCRRDCAGMCTTTATAA |
| consensus | AGCTCCRAARRYYCRAGRCATYTTT |
| sequence | CYSTTACRGTRRYTTCCCACARKRC |
| 99%_Identity | MYAGCGAYATGCAAATHKMTYGMHR |
| | HDNVVKTCRCGRMSCSCKTCYCGCY |
| | VCRGCGCARGCGCGCTGKRYGCTGW |
| | CKCCSSKRRACGSGCCRGBKCGCGR |
| | TTCCCGGGAGCKGGYTGATGACGTT |
| | MGRTCTCCATGGCG |
| | (SEQ ID NO: 710) |
| Lagomorpha | TGAGCTTCCTCCGCCCTAYGGGGRR |
| Alignment | WGSTGSRBYCRRDCAGMCTTTATAA |
| consensus | AGCTCCRAARRYYCRAGRCATYTTT |
| sequence | CYSTTACRGTRRYTTCCCACARKRC |
| 100%_Identity | MYAGCGAYATGCAAATHKMTYGMHR |
| | HDNVVKTCRCGRMSCSCKTCYCGCY |
| | VCRGCGCARGCGCGCTGKRYGCTGW |
| | CKCCSSKRRACGSGCCRGBKCGCGR |
| | TTCCCGGGAGCKGGYTGATGACGTT |
| | MGRTCTCCATGGCG |
| | (SEQ ID NO: 711) |

[0183] In some embodiments, the promoter comprises a nucleotide sequence having at least 85%, 90%, 95%, 96%, 97%, 98%, 99%, or 100% identity to nucleotides 20-233 of any one of SEQ ID NOs: 706-711 or a functional fragment or variant (e.g., codon optimized) thereof.

### Marsupial H1 Promoters

[0184] In certain embodiments, the promoter comprises a Marsupial H1 promoter. An alignment of Marsupial H1 promoter sequences is provided in FIG. 13 (wherein sequences numbered 1-7 in FIG. 13 correspond to SEQ ID NOs: 712-718, and consensus/100%, consensus/90%, consensus/80% and consensus/70% correspond to SEQ ID NOs: 1843-1846, respectively). In some embodiments, the promoter comprises a nucleotide sequence having at least 85%, 90%, 95%, 96%, 97%, 98%, 99%, or 100% identity to nucleotides 20-270 of any one of the sequences in FIG. 13 or a functional fragment or variant (e.g., codon optimized) thereof.

[0185] In certain embodiments, the Marsupial H1 promoter comprises a sequence selected from those in TABLE 11.

TABLE 11

| | |
|---|---|
| Marsupial | TGAGCTTCCCYCCGCCCTAYGKNRS |
| Alignment | VVKSCCKCMHRRRSRSCKMTATATA |
| consensus | ASGCTCRCMAAWYCMGTRCTMYTTC |
| sequence | TWRCAGAGGGYGARWANYCCCRTGA |
| 75%_Identity | TMCYYRGCGGYATGCAAAYARBAGN |
| | TYRCRTCAGAGYAGRGCRCRRYCWD |
| | CCRSTCYYTCCTAGCGCGGGAAATN |
| | CYRTTTTCTTCWKMRGTCNYMGGKR |
| | ACRVGCGCRTGCGCNNNAKMCWGWR |
| | RRYGRYCYNNNNNNRYRGKYYBGYS |
| | DGGAWTCGGTTKRGAGCRCYATGGC |
| | (SEQ ID NO: 719) |
| Marsupial | TGAGCTTCCCYCCGCCCTAYGKNRS |
| Alignment | VVKSCCKCMHRRRSRSCKMTATATA |
| consensus | ASGCTCRCMAAWYCMGTRCTMYTTC |
| sequence | TWRCAGAGGGYGARWANYCCCRTGA |
| | TMCYYRGCGGYATGCAAAYARBAGN |
| | TYRCRTCAGAGYAGRGCRCRRYCWD |
| | CCRSTCYYTCCTAGCGCGGGAAATN |
| | CYRTTTTCTTCWKMRGTCNYMGGKR |
| | ACRVGCGCRTGCGCNNNAKMCWGWR |
| | RRYGRYCYNNNNNNRYRGKYYBGYS |
| | DGGAWTCGGTTKRGAGCRCYATGGC |
| | (SEQ ID NO: 720) |
| 85%_Identity | |
| Marsupial | TGAGCTTCCCYCCGCCCTAYGKNRS |
| Alignment | VVKSCCKCMHRRRSRSCKMTATATA |
| consensus | ASGCTCRCMAAWYCMGTRCTMYTTC |
| sequence | TWRCAGAGGGYGARWANYCCCRTGA |
| 90% Identity | TMCYYRGCGGYATGCAAAYARBAGN |
| | TYRCRTCAGAGYAGRGCRCRRYCWD |
| | CCRSTCYYTCCTAGCGCGGGAAATN |
| | CYRTTYTCTTCWKMRGTCNYMGGKR |
| | ACRVGCGCRTGCGCNNNAKMCWGWR |
| | RRYGRYCYNNNNNNRYRGKYYBGYS |
| | DGGAWTCGGTTKRGAGCRCYATGGC |
| | (SEQ ID NO: 721) |
| Marsupial | TGAGCTTCCCYCCGCCCTAYGKNRS |
| Alignment | VVKSCCKCMHRRRSRSCKMTATATA |
| consensus | ASGCTCRCMAAWYCMGTRCTMYTTC |
| sequence | TWRCAGAGGGYGARWANYCCCRTGA |
| 95%_Identity | TMCYYRGCGGYATGCAAAYARBAGN |
| | TYRCRTCAGAGYAGRGCRCRRYCWD |
| | CCRSTCYYTCCTAGCGCGGGAAATN |
| | CYRTTYTCTTCWKMRGTCNYMGGKR |
| | ACRVGCGCRTGCGCNNNAKMCWGWR |
| | RRYGRYCYNNNNNNRYRGKYYBGYS |
| | DGGAWTCGGTTKRGAGCRCYATGGC |
| | (SEQ ID NO: 722) |
| Marsupial | TGAGCTTCCCYCCGCCCTAYGKNRS |
| Alignment | VVKSCCKCMHRRRSRSCKMTATATA |
| consensus | ASGCTCRCMAAWYCMGTRCTMYTTC |
| sequence | TWRCAGAGGGYGARWANYCCCRTGA |
| 99%_Identity | TMCYYRGCGGYATGCAAAYARBAGN |
| | TYRCRTCAGAGYAGRGCRCRRYCWD |
| | CCRSTCYYTCCTAGCGCGGGAAATN |
| | CYRTTYTCTTCWKMRGTCNYMGGKR |
| | ACRVGCGCRTGCGCNNNAKMCWGWR |
| | RRYGRYCYNNNNNNRYRGKYYBGYS |
| | DGGAWTCGGTTKRGAGCRCYATGGC |
| | (SEQ ID NO: 723) |
| Marsupial | TGAGCTTCCCYCCGCCCTAYGKNRS |
| Alignment | VVKSCCKCMHRRRSRSCKMTATATA |
| consensus | ASGCTCRCMAAWYCMGTRCTMYTTC |
| sequence | TWRCAGAGGGYGARWANYCCCRTGA |
| 100%_Identity | TMCYYRGCGGYATGCAAAYARBAGN |
| | TYRCRTCAGAGYAGRGCRCRRYCWD |
| | CCRSTCYYTCCTAGCGCGGGAAATN |
| | CYRTTYTCTTCWKMRGTCNYMGGKR |
| | ACRVGCGCRTGCGCNNNAKMCWGWR |
| | RRYGRYCYNNNNNNRYRGKYYBGYS |
| | DGGAWTCGGTTKRGAGCRCYATGGC |
| | (SEQ ID NO: 724) |

[0186] In some embodiments, the promoter comprises a nucleotide sequence having at least 85%, 90%, 95%, 96%, 97%, 98%, 99%, or 100% identity to nucleotides 20-270 of any one of SEQ ID NOs: 719-724 or a functional fragment or variant (e.g., codon optimized) thereof.

### Pangolin H1 Promoters

[0187] In certain embodiments, the promoter comprises an Pangolin H1 promoter. An alignment of Pangolin H1 promoter sequences is provided in FIG. 14 (wherein sequences numbered 1-4 in FIG. 14 correspond to SEQ ID NOs: 725-728, and consensus/100%, consensus/90%, consensus/80% and consensus/70% correspond to SEQ ID NOs: 1847-1850, respectively). In some embodiments, the promoter comprises a nucleotide sequence having at least 85%, 90%, 95%, 96%, 97%, 98%, 99%, or 100% identity to nucleotides 20-255 of any one of the sequences in FIG. 14 or a functional fragment or variant (e.g., codon optimized) thereof.

[0188] In certain embodiments, the Pangolin H1 promoter comprises a sequence selected from those in TABLE 12.

TABLE 12

| | |
|---|---|
| Pangolin | TGAGCTTCCCTCCGCCCTATGGCAG |
| Alignment | AAAGCRGCCCGCCGCCGCATTTATA |
| consensus | AGGCTCTCCCACCTAAAGCCATATA |
| sequence | MTGGTTATGGTGACTTCCCAGAAKA |
| 75% Identity | CATGGCAACATGCAAATATANTGCG |
| | GTMTACYTCCCCTGTBGCGCGTAGG |
| | CGTCTCCTCCCCTGGACGMACGGGC |
| | GCNGCATGTTCCCGCCCTATGACTC |
| | TGGGCCDGCGACTACGGGAGAGAGC |
| | TGATGACGTGACCGCGACCGCTCGG |
| | GBTCCATGGCG |
| | (SEQ ID NO: 729) |
| Pangolin | TGAGCTTCCCTCCGCCCTAYRGMRR |
| Alignment | MMAGCRSCCCSSMSCNGCAYTTATA |
| consensus | AGSCTCTCCCWMCTAAAGMCATWTR |
| sequence | MYGRTTATGGTGACTTCCCASAAKA |
| 85%_Identity | CATRGCWACATGCAAATAYMNYGCG |
| | KTMTRCYKCCCCTGTBGCGCGTAGG |
| | CGTCTCCYCCCCNGGACGMRYRGGC |
| | GCNGCRTKYYCYCSCYSTRTGACTC |
| | KRGGCYDGCGACTACSGGAGMGNGC |
| | TGATGACGTGASCGCGACCGCTCGS |
| | GBTCCATGGCG |
| | (SEQ ID NO: 730) |
| Pangolin | TGAGCTTCCCTCCGCCCTAYRGMRR |
| Alignment | MMAGCRSCCCSSMSCNGCAYTTATA |
| consensus | AGSCTCTCCCWMCTAAAGMCATWTR |
| sequence | MYGRTTATGGTGACTTCCCASAAKA |
| 90%_Identity | CATRGCWACATGCAAATAYMNYGCG |
| | KTMTRCYKCCCCTGTBGCGCGTAGG |
| | CGTCTCCYCCCCNGGACGMRYRGGC |
| | GCNGCRTKYYCYCSCYSTRTGACTC |
| | KRGGCYDGCGACTACSGGAGMGNGC |
| | TGATGACGTGASCGCGACCGCTCGS |
| | GBTCCATGGCG |
| | (SEQ ID NO: 731) |
| Pangolin | TGAGCTTCCCTCCGCCCTAYRGMRR |
| Alignment | MMAGCRSCCCSSMSCNGCAYTTATA |
| consensus | AGSCTCTCCCWMCTAAAGMCATWTR |
| sequence | MYGRTTATGGTGACTTCCCASAAKA |
| 95%_Identity | CATRGCWACATGCAAATAYMNYGCG |
| | KTMTRCYKCCCCTGTBGCGCGTAGG |
| | CGTCTCCYCCCCNGGACGMRYRGGC |
| | GCNGCRTKYYCYCSCYSTRTGACTC |
| | KRGGCYDGCGACTACSGGAGMGNGC |
| | TGATGACGTGASCGCGACCGCTCGS |
| | GBTCCATGGCG |
| | (SEQ ID NO: 732) |
| Pangolin | TGAGCTTCCCTCCGCCCTAYRGMRR |
| Alignment | MMAGCRSCCCSSMSCNGCAYTTATA |
| consensus | AGSCTCTCCCWMCTAAAGMCATWTR |
| sequence | MYGRTTATGGTGACTTCCCASAAKA |
| 99%_Identity | CATRGCWACATGCAAATAYMNYGCG |
| | KTMTRCYKCCCCTGTBGCGCGTAGG |
| | CGTCTCCYCCCCNGGACGMRYRGGC |
| | GCNGCRTKYYCYCSCYSTRTGACTC |
| | KRGGCYDGCGACTACSGGAGMGNGC |
| | TGATGACGTGASCGCGACCGCTCGS |
| | GBTCCATGGCG |
| | (SEQ ID NO: 733) |
| Pangolin | TGAGCTTCCCTCCGCCCTAYRGMRR |
| Alignment | MMAGCRSCCCSSMSCNGCAYTTATA |
| consensus | AGSCTCTCCCWMCTAAAGMCATWTR |
| sequence | MYGRTTATGGTGACTTCCCASAAKA |
| 100% Identity | CATRGCWACATGCAAATAYMNYGCG |
| | KTMTRCYKCCCCTGTBGCGCGTAGG |
| | CGTCTCCYCCCCNGGACGMRYRGGC |
| | GCNGCRTKYYCYCSCYSTRTGACTC |
| | KRGGCYDGCGACTACSGGAGMGNGC |
| | TGATGACGTGASCGCGACCGCTCGS |
| | GBTCCATGGCG |
| | (SEQ ID NO: 734) |

[0189] In some embodiments, the promoter comprises a nucleotide sequence having at least 85%, 90%, 95%, 96%, 97%, 98%, 99%, or 100% identity to nucleotides 20-255 of any one of SEQ ID NOs: 729-734 or a functional fragment or variant (e.g., codon optimized) thereof.

### Perissodactyla H1 Promoters

[0190] In certain embodiments, the promoter comprises an Perissodactyla H1 promoter. An alignment of Perissodactyla H1 promoter sequences is provided in FIG. 15 (wherein sequences numbered 1-13 in FIG. 15 correspond to SEQ ID NOs: 735-747, and consensus/100%, consensus/90%, consensus/80% and consensus/70% correspond to SEQ ID NOs: 1851-1854, respectively). In some embodiments, the promoter comprises a nucleotide sequence having at least 85%, 90%, 95%, 96%, 97%, 98%, 99%, or 100% identity to nucleotides 20-251 of any one of the sequences in FIG. 15 or a functional fragment or variant (e.g., codon optimized) thereof.

[0191] In certain embodiments, the Perissodactyla H1 promoter comprises a sequence selected from those in TABLE 13.

TABLE 13

| | |
|---|---|
| Perissodactyla | TGAGCTTCCCTCCGCCCTAYGGRGM |
| Alignment | AAAMMDGCNCMMGGCRGCMTTTATA |
| consensus | AGACTCACAKATCTAAAGMCATTTC |
| sequence | ACRRWTAGGGTGACTTCCCACARKR |
| 75% Identity | CACAGCGAYATGCAAAYATMGYGGR |
| | GCGTGCCTYYCCWGTMYCYKGYGGG |
| | CATCTNNNCKCCTRSACGCACGCGC |
| | GCCGSGTGTTCCCGCSCTGTGACKC |
| | TAGGYRRGCSHTTCMTGGGAGAGRG |
| | TTGATGACGKCARCATTCGGRCTCC |
| | ATGGCG |
| | (SEQ ID NO: 748) |
| Perissodactyla | TGAGCTTCCCTCCGCCCTAYGGRGM |
| Alignment | AAAVMDGCNCMMGGCRGCMTTTATA |
| consensus | AGACTCACAKATCTAAAGMCATTTC |
| sequence | ACRRWTAGGGTGACTTCCCACARKR |
| 85%_Identity | CACAGCGAYATGCAAAYATMGYGGR |
| | GCGTGCCTYYCCWGTMYCYKGYGGG |
| | YATCTNNNCKCCTRSACGCACGCGC |
| | GCCGSGTGTTCCCGCSCTGTGACKC |
| | TAGGYRRGCSHTTCMTGGGAGAGRG |
| | TTGATGACGKCARCATTCGGRCTCC |
| | ATGGCG |
| | (SEQ ID NO: 749) |
| Perissodactyla | TGAGCTTCCCTCCGCCCTMYGRRGV |
| Alignment | AARVMDGNCNCHHRGCDGCMTTTAT |
| consensus | AAGACTCACAKRTCTRAAGMCATTT |
| sequence | MACRRWTAGGGTGACTTCCCACARK |
| 90%_Identity | RCACAGCGAYATGCAAAYATMGYGG |
| | RRYGTRCYTYYCCWGTMYCYKGYGG |
| | GYATCTNNNCKCCTRSACGCACGCG |
| | CRCCGSGTGTTCCCGCSCTGTGWCK |
| | CTAGGYRRGCSHTTCMTGGGAGRGR |
| | GKTGATGAYGKCARCAYTCGGVCTC |
| | CATGGCG |
| | (SEQ ID NO: 750) |
| Perissodactyla | TGAGCTTCCCTCCGCYCTMYRRRGV |
| Alignment | ARRVMDGNCNMHHRGCDGCMTTTAT |
| consensus | AAGACTCACAKRTCTRAAGMCATTT |
| sequence | MACRRWTAGGGTGACTTCCCACARK |
| 95%_Identity | VCACAGCRAYATGCAAAYATMGYGG |
| | RRYGYRCYTYYCCWGTMYCBKGYRG |
| | GYATCTNNNCKCCTRSACGCACGCG |
| | CRCCGSGTGTTCCCGCSCTGTGWCK |
| | CTAGGYRRGCSHTTCMYGRGRGRGR |
| | GKTGATGAYGKCARCMYTCGGVCTC |
| | MATGGCG |
| | (SEQ ID NO: 751) |
| Perissodactyla | TGAGCTTCCCTCCGCYCTMYRRRGV |
| Alignment | ARRVMDGNCNMHHRGCDGCMTTTAT |
| consensus | AAGACTCACAKRTCTRAAGMCATTT |
| sequence | MACRRWTAGGGTGACTTCCCACARK |
| 99% Identity | VCACAGCRAYATGCAAAYATMGYGG |
| | RRYGYRCYTYYCCWGTMYCBKGYRG |
| | GYATCTNNNCKCCTRSACGCACGCG |
| | CRCCGSGTGTTCCCGCSCTGTGWCK |
| | CTAGGYRRGCSHTTCMYGRGRGRGR |
| | GKTGATGAYGKCARCMYTCGGVCTC |
| | MATGGCG |
| | (SEQ ID NO: 752) |
| Perissodactyla | TGAGCTTCCCTCCGCYCTMYRRRGV |
| Alignment | ARRVMDGNCNMHHRGCDGCMTTTAT |
| consensus | AAGACTCACAKRTCTRAAGMCATTT |
| sequence | MACRRWTAGGGTGACTTCCCACARK |
| 100%_Identity | VCACAGCRAYATGCAAAYATMGYGG |
| | RRYGYRCYTYYCCWGTMYCBKGYRG |
| | GYATCTNNNCKCCTRSACGCACGCG |
| | CRCCGSGTGTTCCCGCSCTGTGWCK |
| | CTAGGYRRGCSHTTCMYGRGRGRGR |
| | GKTGATGAYGKCARCMYTCGGVCTC |
| | MATGGCG |
| | (SEQ ID NO: 753) |

[0192] In some embodiments, the promoter comprises a nucleotide sequence having at least 85%, 90%, 95%, 96%, 97%, 98%, 99%, or 100% identity to nucleotides 20-250 of any one of SEQ ID NOs: 748-753 or a functional fragment or variant (e.g., codon optimized) thereof.

### Primate H1 Promoters

[0193] In certain embodiments, the promoter comprises a Primate H1 promoter. An alignment of Primate H1 promoter sequences is provided in FIG. 16 (wherein sequences numbered 1-30 in FIG. 16 correspond to SEQ ID NOs: 754-783, and consensus/100%, consensus/90%, consensus/80% and consensus/70% correspond to SEQ ID NOs: 1855-1858, respectively). FIG. 17 provides an second alignment of H1 promoter sequences from Primate species showing the TATA box, PSE, Staf, and DSE binding sites. Sequences numbered 1-30 in the alignment correspond to SEQ ID NOs: 755, 758, 759, 756, 757, 780, 783, 754, 761, 760, 769, 781, 765, 779, 771, 783, 766, 770, 774, 763, 764, 767, 772, 762, 775, 776, 777, 768, 773, and 788, respectively. The consensus sequence shown in FIG. 17 corresponds to SEQ ID NO: 1868. In some embodiments, the promoter comprises a nucleotide sequence having at least 85%, 90%, 95%, 96%, 97%, 98%, 99%, or 100% identity to nucleotides 20-267 of any one of the sequences in FIG. 16 or FIG. 17 or a functional fragment or variant (e.g., codon optimized) thereof. In certain embodiments, a functional fragment of a primate H1 promoter comprises at least a TATA box, or a PSE, Staf, or DSE binding site.

[0194] In certain embodiments, the Primate H1 promoter comprises a sequence selected from those in TABLE 14.

TABLE 14

| | |
|---|---|
| Primate | TGAGCTTCCCTCCGCCCTATGRGRA |
| Alignment | ARRGTGGTYCYAYNCAGAACTTATA |
| consensus | AGRYTCCCAWAYYYAAAGACATTTC |
| sequence | WCGWTTATGGTGAYTTCCCAGAABA |
| 75%_Identity | CAYAGCGACATGCAAATATTGYAGG |
| | GCGTSMCWCCCCTGTCCCTYACRGY |
| | CRTCTTCCTGCCAGGGCGCACGCGC |
| | GCTGGGTGTTCCCGCSTAGTGACDC |
| | TGGGCCCGCGATTCCTTGGAGCGGG |
| | TTGATGACGTCAGCGTTCGAATTCC |
| | ATGGCG |
| | (SEQ ID NO: 784) |
| Primate | TGAGCTTCCCTCCGCCCTAYGRGRA |
| Alignment | ARRVKRRKYYYDYNSAGARYTTATA |
| consensus | AGRYTCCCADAYYYAAAGACATTTC |
| sequence | WCSWTTATGGTGAYTTCCCASAABM |
| 85%_Identity | CAYAGCGACATGCAAATATYGYAGG |
| | KCGYSMCWCSCCKGTCCCWYACRGB |
| | CRTCWWCYYKCCAGDGCGCACGCGC |
| | GCTGSGTGTNCCCGCSWNSTGACDC |
| | TGGGCYCGCGATTCCTBGGAGCGGG |
| | TTGRTGACGTCAGCKYYSGWRYTYC |
| | ATGGCG |
| | (SEQ ID NO: 785) |
| Primate | TGAGCTTCCCTCCGCCCTAYGRGRR |
| Alignment | ARRVKRRKBYYDYNSAGARYTTATA |
| consensus | AGRYTCCCADAYYYDAAGACATTTY |
| sequence | WCSWTTATGGTGAYTTCCCASAABM |
| 90%_Identity | CAYAGCGACATGCAAATATYKYAGG |
| | KCGYVHCWCSCCKGTCCYWYANRGB |
| | CRTCWWCYYKCCAGDGCGCVCGCGC |
| | GCTGSGTGTNNCCCGCSWNSTGACD |
| | CTGSGCYCGCGATTCCTBNGAGCGG |
| | GTTGRTRACGTCAGCKYYSGWRYKY |
| | CATGGCG |
| | (SEQ ID NO: 786) |
| Primate | TGAGCTTCCCTCCGCCCTAYSVSNR |
| Alignment | ARRVBNVKBHYDBNBVSWNYTTATA |
| consensus | AGRYTYNCANWYBBDRAVMBMTTTN |
| sequence | WHSDTTAYGGTGAYTTCCCASAABV |
| 95%_Identity | CAYAGCGACATGCAAATATNKYRGR |
| | KCGYVHYWCNNCHDSTNNYNNNNDN |
| | BNNWCDNCYHNYCVNDGCGCVCGCG |
| | CRCTNBRYKTNNCNCGCNNNSDNSK |
| | GACDCNNNGCYCGSGRTTCVTBNSA |
| | NCGRGTNGNKNACGTCARHKNYBSN |
| | NNNYCATGGCG |
| | (SEQ ID NO: 787) |
| Primate | TGAGCTTCCCTCCGCCYTRYSVSNV |
| Alignment | RRRNBNNBNHHNBNBVSWNYTTATA |
| consensus | ARRYTYNCANHHNBDRRVMBMTTTN |
| sequence | WHBDTKABGGTGAYTTCCCABMABV |
| 99%_Identity | CRYWGCKMCATGYAAANRKNBHVSR |
| | DYSYVNNNNNNNNNNNCHDVNNNNN |
| | NNNNNNNNNNNNNNNNNNCVNNGYG |
| | SVCKCKCRYKNNVYKTNNNNCGCNN |
| | NSDNNNNNNNSNGWYNSNNNRCYCR |
| | SGDTTSVNNNNNNCKNGNNNNNNAC |
| | STSARHNNNNNNNNNHMATGGCG |
| | (SEQ ID NO: 788) |
| Primate | TGAGCTTCCCTCCGCCYTRYSVSNV |
| Alignment | RRRNBNNBNHHNBNBVSWNYTTATA |
| consensus | ARRYTYNCANHHNBDRRVMBMTTTN |
| sequence | WHBDTKABGGTGAYTTCCCABMABV |
| 100%_Identity | CRYWGCKMCATGYAAANRKNBHVSR |
| | DYSYVNNNNNNNNNNNCHDVNNNNN |
| | NNNNNNNNNNNNNNNNNNCVNNGYG |
| | SVCKCKCRYKNNVYKTNNNNCGCNN |
| | NSDNNNNNNNSNGWYNSNNNRCYCR |
| | SGDTTSVNNNNNNCKNGNNNNNNAC |
| | STSARHNNNNNNNNNHMATGGCG |
| | (SEQ ID NO: 789) |

[0195] In some embodiments, the promoter comprises a nucleotide sequence having at least 85%, 90%, 95%, 96%, 97%, 98%, 99%, or 100% identity to nucleotides 20-250 of any one of SEQ ID NOs: 784-789 or a functional fragment or variant (e.g., codon optimized) thereof.

### Rodent H1 Promoters

[0196] In certain embodiments, the promoter comprises a Rodent H1 promoter. An alignment of Rodent H1 promoter sequences is provided in FIG. 18 (wherein sequences numbered 1-114 in FIG. 18 correspond to SEQ ID NOs: 790-903 or 1859, and consensus/100%, consensus/90%, consensus/80% and consensus/70% correspond to SEQ ID NOs: 1860-1863, respectively). In some embodiments, the promoter comprises a nucleotide sequence having at least 85%, 90%, 95%, 96%, 97%, 98%, 99%, or 100% identity to nucleotides 20-296 any one of the sequences in FIG. 18 or a functional fragment or variant (e.g., codon optimized) thereof.

[0197] In certain embodiments, the Rodent H1 promoter a sequence selected from those in TABLE 15.

TABLE 15

| | |
|---|---|
| Rodent | TGAGCTTCCYYCSSCCMYHTRRRRV |
| Alignment | RDRBDSRBYWSCMRGCVRVMHYTAT |
| consensus | AAGRCTCSMAWRYMKVMRKRHATTT |
| sequence | YWAYRVTYAYGGTGRYTTCCCACAA |
| 75%_Identity | VRCACAGCGMKACGGTGYWRATWTR |
| | SMWGRGHGYRYCKYSCCCMSBKSBN |
| | GBCCDSYCVKSATTTGCATGTBTYY |
| | TMDCYTVRGGCTKCMYGCKCRCTAG |
| | CGCGCATACTGCRKGKYSMSRGMCW |
| | RKGACAGTGMNWRAGCCYGCGMWTC |
| | CCGSCYSGGMRMKRGNTGATGACGT |
| | CATCCCCRKCSYYYRARCKCSATGG |
| | CG |
| | (SEQ ID NO: 904) |
| Rodent | TGAGCTTCCYYCSSCCVYHTRVRRV |
| Alignment | VDDBDNDBYHVCVRSSVRVVHYTAT |
| consensus | AAGRSTCSVRDRBVKVMRBVHAYTT |
| sequence | YWAYRVTYABGGTRRYTWCCCACAA |
| 85%_Identity | NRCAYAGCGMBVCGGWSYWDATWTV |
| | SMDRRSHSYRYYKYVYCCHVBKVBN |
| | GBCCNBBYVKBATTTGCATGTBYYB |
| | THDYYTVVRSCTKCMBGYKCNCWMG |
| | CGCGCAYRCTGYRKRKHSMSRRMMD |
| | RKGACAGTGMNHRRSCCHGCGMWTY |
| | CCGSYYSGGMRVDRRNTGATGACGT |
| | CATCCCCRKSSYYYRARMKCSATGG |
| | CG |
| | (SEQ ID NO: 905) |
| Rodent | TGAGCTTCCYYCSSCCVYHYDVRRN |
| Alignment | VNDNDNDBYHVCVRSSVRVVHYTAT |
| consensus | AAGRBKCVVRDRBVBVVVBVNMYYT |
| sequence | HWAYRNTYABGGTRRYTWCCCASAA |
| 90% Identity | NRCAYAGCGHBVCGGWSYWDATWTV |
| | VHDRRSHNYRYYBYVBCCHVBBVNN |
| | NBCCNBBBVDBATTTGCATGTBYBB |
| | THNBYTNNRNCTBCMBRYKMNCWMG |
| | CGCGCAYRCYRYRBRKHSVBRRMMN |
| | RKSACAGTGMNHRRSCSHGMGMWBY |
| | CCGSYYSGGHDVDRRNTGRTGACRT |
| | CATCCCCRKBSYYYRRVMKCSATGG |
| | CG |
| | (SEQ ID NO: 906) |
| Rodent | TGAGCTTCCYYCSVCCVYNHDNVVN |
| Alignment | NNNNNNNNBNVCNDVNVRVVNYWAW |
| consensus | AARVNKYVVRNRBVNNVVBVNMYBT |
| sequence | HWAHRNTBRBGGTRRYTWCCCASRA |
| 95%_Identity | NRCRYWGCGHNVCGGHSYWNATWKN |
| | VHDRRVHNBNBBBYNNCCNVNBNNN |
| | NNNCNNNBNDBATTTGCATGTBBBN |
| | KHNBBTNNVNCTBYHNRYBMNCWMG |
| | CGCGCAYRCYRYRBVKNBVBVVMVN |
| | RDSMSAGTGMNHRRBCSNKHRVDBY |
| | CCGSYYBGSHDVNDDNTGRTGACRT |
| | CATCCCCRKBVYYYVRVHKCBATGG |
| | CG |
| | (SEQ ID NO: 907) |
| Rodent | TGAGCTTCCYHCNVCCNBNNNNVVN |
| Alignment | NNNNNNNNBNNCNNVNNVVNNHWWW |
| consensus | AARVNBHNVRNVNNNNNVNNNVBNY |
| sequence | HNAHRNTBRBGGYVRYTWCCCABRA |
| 99%_Identity | NVCRYDRCGHNVCGGHSYHNATNDN |
| | NHNRNVNNNNNBBNNNCCNNNNNNN |
| | NNNHNNNNNNNATTTGCATGTBBBN |
| | BNNBBTNNNNCTBYNNDYBHNSWMG |
| | CGCGCAYRCBRNDNVBNNVBNVVVN |
| | VNVVSAGTGMNNNNNBSNDNDNNBY |
| | CCGVNBBGVNDNNNDNYGDBGACVT |
| | CATCCCCDBNNHBHVRVHKYBATGG |
| | CG |
| | (SEQ ID NO: 908) |
| Rodent | TGAGCTTCCYHCNVCCNNNNNNVNN |
| Alignment | NNNNNNNNBNNCNNVNNVNNNHWWW |
| consensus | ARRVNNNNVVNVNNNNNNNNNVBNY |
| sequence | HNANVNWBRBGRYVDYKDCCMRBRA |
| 100%_Identity | NVYDHDRCRNNVCGGHSYHNMYNNN |
| | NNNDNVNNNNNBBNNNCCNNNNNNN |
| | NNNHNNNNNNNATTTGCATGTBBBN |
| | BNNBBTNNNNCTBHNNDHNHNSWMG |
| | CGCGCAYRCBRNDNVBNNVBNVVVN |
| | NNVVSAGTGMNNNNNBBNNNDNNBY |
| | CCGVNBNSNNDNNNNNBRDBGACVY |
| | CATCCCYNBNNHBNVDNNDBNATGG |
| | CG |
| | (SEQ ID NO: 909) |

[0198] In some embodiments, the promoter comprises a nucleotide sequence having at least 85%, 90%, 95%, 96%, 97%, 98%, 99%, or 100% identity to nucleotides 20-296 of any one of SEQ ID NOs: 904-909 or a functional fragment or variant (e.g., codon optimized) thereof.

### Xenarthra H1 Promoters

[0199] In certain embodiments, the promoter comprises an Xenarthra H1 promoter. An alignment of Xenarthra H1 promoter sequences is provided in FIG. 19 (wherein sequences numbered 1-10 in FIG. 19 correspond to SEQ ID NOs: 910-919, and consensus/100%, consensus/90%, consensus/80% and consensus/70% correspond to SEQ ID NOs: 1864-1867, respectively) In some embodiments, the promoter comprises a nucleotide sequence having at least 85%, 90%, 95%, 96%, 97%, 98%, 99%, or 100% identity to nucleotides 20-234 of any one of the sequences in FIG. 19 or a functional fragment or variant (e.g., codon optimized) thereof.

[0200] In certain embodiments, the Xenarthra H1 promoter comprises a sequence selected from those in TABLE 16.

TABLE 16

| | |
|---|---|
| Xenarthra | TGAGCTTCCCTCCGCCCKATARRRA |
| Alignment | RMVHSVDKYBTANGCDGGATTTATA |
| consensus | AGAYWCCCAYAKCTAAAGMCATTTC |
| sequence | WCRGTTAYGGTGNACTTCCCACWAC |
| 75% Identity | ACAYRGCGAWATGCAAATATNGYGG |
| | ARSWGKYSCTGAGGCGTGGTMRRGC |
| | GCRCGCGCGCTGMGAGTTCCCGCCY |
| | TKYGGYSCTRGGCYSRAGATKCCTG |
| | AGARCKGGYTGATGACGKCWRCGTT |
| | YGGRCKCCATGGCG |
| | (SEQ ID NO: 920) |
| Xenarthra | TGAGCTTCCCTCCGCCCKRTRRRRH |
| Alignment | RMVHVVDKYBTWNRCDGGATTTATA |
| consensus | AGAYWCCCAYWKCTAHRGMCATTTS |
| sequence | WCRGTTAYGGTGNACTTCCCACWAB |
| 85%_Identity | ACHYRGCGAWATGCAAATATNRYGG |
| | ARBWGKYSCTGAGGCGYGGYVRRRC |
| | GCR |
| | VGCGCGCTGMGAGTTCCCGCCYTBY |
| | SRYSCTRGGYYSNAGRTKCCTGRRR |
| | RCKGGYTGAWSACKKCWRYGTTYGG |
| | RYKCMATGGCG |
| | (SEQ ID NO: 921) |
| Xenarthra | TGAGCTTCCCTCCGCCCKRTRRRRH |
| Alignment | RMVHVVDKYBTWNRCDGGATTTATA |
| consensus | AGAYWCCCAYWKCTAHRGMCATTTS |
| sequence | WCRGTTAYGGTGNACTTCCCACWAB |
| 90%_Identity | ACHYRGCGAWATGCAAATATNRYGG |
| | ARBWGKYSCTGAGGCGYGGYVRRRC |
| | GCRVGCGCGCTGMGAGTTCCCGCCY |
| | TBYSRYSCTRGGYYSNAGRTKCCTG |
| | RRRRCKGGYTGAWSACKKCWRYGTT |
| | YGGRYKCMATGGCG |
| | (SEQ ID NO: 922) |
| Xenarthra | TGAGCTTCCCTCCGCCCBRYRRRRH |
| Alignment | RMNNVNDNBYBWWNRCNGGAYTTAT |
| consensus | AAGRYWCCCAHWKCWAHRKMYATTT |
| sequence | SWYRRTTABGGTGNAYTTCCCASWA |
| 95%_Identity | BACHYRGCGAWATGCAAATATNRYG |
| | GARBDGKYVCKGAGGCKYGGYVRRR |
| | MGCRVGCGCGCTGVKASTTCCCGCC |
| | BKBYSRYSMTRGKYYBNAGRTKCCT |
| | GRRRRSKGGHTGAWSASKBYDRYGT |
| | TYGKRYDCMATGGCG |
| | (SEQ ID NO: 923) |
| Xenarthra | TGAGCTTCCCTCCGCCCBRYRRRRH |
| Alignment | RMNNVNDNBYBWWNRCNGGAYTTAT |
| consensus | AAGRYWCCCAHWKCWAHRKMYATTT |
| sequence | SWYRRTTABGGTGNAYTTCCCASWA |
| 99% Identity | BACHYRGCGAWATGCAAATATNRYG |
| | GARBDGKYVCKGAGGCKYGGYVRRR |
| | MGCRVGCGCGCTGVKASTTCCCGCC |
| | BKBYSRYSMTRGKYYBNAGRTKCCT |
| | GRRRRSKGGHTGAWSASKBYDRYGT |
| | TYGKRYDCMATGGCG |
| | (SEQ ID NO: 924) |
| Xenarthra | TGAGCTTCCCTCCGCCCBRYRRRRH |
| Alignment | RMNNVNDNBYBWWNRCNGGAYTTAT |
| consensus | AAGRYWCCCAHWKCWAHRKMYATTT |
| sequence | SWYRRTTABGGTGNAYTTCCCASWA |
| 100%_Identity | BACHYRGCGAWATGCAAATATNRYG |
| | GARBDGKYVCKGAGGCKYGGYVRRR |
| | MGCRVGCGCGCTGVKASTTCCCGCC |
| | BKBYSRYSMTRGKYYBNAGRTKCCT |
| | GRRRRSKGGHTGAWSASKBYDRYGT |
| | TYGKRYDCMATGGCG |
| | (SEQ ID NO: 925) |

[0201] In some embodiments, the promoter comprises a nucleotide sequence having at least 85%, 90%, 95%, 96%, 97%, 98%, 99%, or 100% identity to nucleotides 20-233 of any one of SEQ ID NOs: 920-925 or a functional fragment or variant (e.g., codon optimized) thereof.

Gar1 promoters

[0202] A custom perl script was developed to compare the 5′ transcriptional start sites of pol III genes with that of pol II genes. The results were filtered for those that are orientated in opposite directions (divergent transcription). One compact bidirectional promoter identified using this method was the Gar1 promoter. On one side, the GAR1 promoter expresses the GAR1 protein, which is involved with snoRNAs, rRNA processing, and telomerase activity. The GAR1 protein appears to be expressed in all tissues, suggesting that the GAR1 promoter can drive expression ubiquitously (https://www.proteinatlas.org/ENSG00000109534-GAR1/tissue). On the other side, it expresses a lncRNA (AC126283.1 or ENSG00000272795) with unknown function, and high expression in the testis.

[0203] Accordingly in certain embodiments, the promoter is a Gar1 promoter. In certain embodiments, the Gar1 promoter is a mammalian promoter, e.g., a human Gar1 promoter, a carnivora Gar1 promoter, a primate Gar1 promoter, or a rodent Gar1 promoter. In some embodiments, the Gar1 promoter comprises a nucleotide sequence having at least 85%, 90%, 95%, 96%, 97%, 98%, 99%, or 100% identity of any one of SEQ ID NOs: 107-203 or a codon-optimized variant and/or fragment thereof. In some embodiments, the promoter comprises the nucleotide sequence of any one of SEQ ID NOs: 107-203 or a codon-optimized variant and/or fragment thereof.

[0204] In certain embodiments, a functional fragment comprises a truncation of from about 10 bases to about 70 bases at the 5′ end, the 3′ end, or both the 5′ and 3′ ends of any one of SEQ ID NOs: 107-203 or a variant thereof (e.g., a variant having at least 85%, 90%, 95%, 96%, 97%, 98%, 99%, or 100% identity to any one of SEQ ID NOs: 107-203). In certain embodiments, a functional fragment comprises a truncation of about 10 bases at the 5′ end, the 3′ end, or both the 5′ and 3′ ends of any one of SEQ ID NOs: 107-203 or a variant thereof (e.g., a variant having at least 85%, 90%, 95%, 96%, 97%, 98%, 99%, or 100% identity to any one of SEQ ID NOs: 107-203). In certain embodiments, a functional fragment comprises a truncation of about 20 bases at the 5′ end, the 3′ end, or both the 5′ and 3′ ends of any one of SEQ ID NOs: 107-203 or a variant thereof (e.g., a variant having at least 85%, 90%, 95%, 96%, 97%, 98%, 99%, or 100% identity to any one of SEQ ID NOs: 107-203). In certain embodiments, a functional fragment comprises a truncation of about 30 bases at the 5′ end, the 3′ end, or both the 5′ and 3′ ends of any one of SEQ ID NOs: 107-203 or a variant thereof (e.g., a variant having at least 85%, 90%, 95%, 96%, 97%, 98%, 99%, or 100% identity to any one of SEQ ID NOs: 107-203). In certain embodiments, a functional fragment comprises a truncation of about 40 bases at the 5′ end, the 3′ end, or both the 5′ and 3′ ends of any one of SEQ ID NOs: 107-203 or a variant thereof (e.g., a variant having at least 85%, 90%, 95%, 96%, 97%, 98%, 99%, or 100% identity to any one of SEQ ID NOs: 107-203). In certain embodiments, a functional fragment comprises a truncation of about 50 bases at the 5′ end, the 3′ end, or both the 5′ and 3′ ends of any one of SEQ ID NOs: 107-203 or a variant thereof (e.g., a variant having at least 85%, 90%, 95%, 96%, 97%, 98%, 99%, or 100% identity to any one of SEQ ID NOs: 107-203). In certain embodiments, a functional fragment comprises a truncation of about 60 bases at the 5′ end, the 3′ end, or both the 5′ and 3′ ends of any one of SEQ ID NOs: 107-203 or a variant thereof (e.g., a variant having at least 85%, 90%, 95%, 96%, 97%, 98%, 99%, or 100% identity to any one of SEQ ID NOs: 107-203). In certain embodiments, a functional fragment comprises a truncation of about 70 bases at the 5′ end, the 3′ end, or both the 5′ and 3′ ends of any one of SEQ ID NOs: 107-203 or a variant thereof (e.g., a variant having at least 85%, 90%, 95%, 96%, 97%, 98%, 99%, or 100% identity to any one of SEQ ID NOs: 107-203).

[0205] In certain embodiments, the functional fragment comprise at least a transcription factor binding site. Identification of transcription factor binding sites can be determined by consensus, or by using a differential distance matrix or multidimensional scaling (De Bleser P. et al. (2007) Genome Biol 8(5):R83.

[0206] In certain embodiments, the Gar1 promoter comprises a TATA mutation. In certain embodiments, the TATA mutation is a TATAA→TCGAA mutation.

[0207] In certain embodiments, a nucleic acid comprising a Gar1 promoter described herein further comprises a 5′UTR including at least a portion of a beta-globin 5′UTR sequence or a Kozak sequence. In certain embodiments, the 5′UTR includes the nucleotide sequence 5′-GCCGCCACC-3′ (SEQ ID NO: 256), or a 6 bp, a 7 bp, or an 8 bp fragment thereof. In certain embodiments, the 6 bp fragment is 5′-GCCACC-3′ (SEQ ID NO: 257).

[0208] In certain embodiments, a nucleic acid comprising a Gar1 promoter described herein further comprises a terminator sequence. In certain embodiments, the terminator sequence comprises one of the terminator sequences in TABLE 17.

TABLE 17

| | |
|---|---|
| a synthetic | AATAAAATATCTTTATTTTCATTAC |
| poly(A) | ATCTGTGTGTTGGTTTTTTGTGTG |
| sequence (SPA) | (SEQ ID NO: 258) |
| SPA and Pause | AATAAAATATCTTTATTTTCATTAC |
| | ATCTGTGTGTTGGTTTTTTGTGTGA |
| | ATCGATAGTACTAACATACGCTCTC |
| | CATCAAAACAAAACGAAACAAAACA |
| | AACTAGCAAAATAGGCTGTCCCCAG |
| | TGCAAGTGCAGGTGCCAGAACATTT |
| | CTCT |
| | (SEQ ID NO: 259); |
| SV40 (240 bp) | ATCTAGATAACTGATCATAATCAGC |
| | CATACCACATTTGTAGAGGTTTTAC |
| | TTGCTTTAAAAAACCTCCCACACCT |
| | CCCCCTGAACCTGAAACATAAAATG |
| | AATGCAATTGTTGTTGTTAACTTGT |
| | TTATTGCAGCTTATAATGGTTACAA |
| | ATAAAGCAATAGCATCACAAATTTC |
| | ACAAATAAAGCATTTTTTTCACTGC |
| | ATTCTAGTTGTGGTTTGTCCAAACT |
| | CATCAATGTATCTTA |
| | (SEQ ID NO: 260) |
| SV 40-mini | TTGTTTATTGCAGCTTATAATGGTT |
| (120 bp) | ACAAATAAAGCAATAGCATCACAAA |
| | TTTCACAAATAAAGCATTTTTTTCA |
| | CTGCATTCTAGTTGTGGTTTGTCCA |
| | AACTCATCAATGTATCTTAT |
| | (SEQ ID NO: 261) |
| bGH poly A | CGACTGTGCCTTCTAGTTGCCAGCC |
| | ATCTGTTGTTTGCCCCTCCCCCGTG |
| | CCTTCCTTGACCCTGGAAGGTGCCA |
| | CTCCCACTGTCCTTTCCTAATAAAA |
| | TGAGGAAATTGCATCGCATTGTCTG |
| | AGTAGGTGTCATTCTATTCTGGGGG |
| | GTGGGGTGGGGCAGGACAGCAAGGG |
| | GGAGGATTGGGAAGACAATAGCAGG |
| | CATGCTGGGGATGCGGTGGGCTCTA |
| | TGG |
| | (SEQ ID NO: 262) |
| TKpoly A | GGGGGAGGCTAACTGAAACACGGAA |
| | GGAGACAATACCGGAAGGAACCCGC |
| | GCTATGACGGCAATAAAAAGACAGA |
| | ATAAAACGCACGGGTGTTGGGTCGT |
| | TTGTTCATAAACGCGGGGTTCGGTC |
| | CCAGGGCTGGCACTCTGTCGATACC |
| | CCACCGAGACCCCATTGGGGCCAAT |
| | ACGCCCGCGTTTCTTCCTTTTCCCC |
| | ACCCCACCCCCCAAGTTCGGGTGAA |
| | GGCCCAGGGCTCGCAGCCAACGTCG |
| | GGGCGGCAGGCCCTGCCATAG |
| | (SEQ ID NO: 263) |
| SNRPl | GGTATCAAATAAAATACGAAATGTG |
| | ACAGATT |
| | (SEQ ID NO: 264) |
| SNRPla | AAATAAAATACGAAATGTGACAGAT |
| | T |
| | (SEQ ID NO: 265) |
| Histone H4B | GGTTGCTGATTTCTCCACAGCTTGC |
| | ATTTCTGAACCAAAGGCCCTTTTCA |
| | GGGCCGCCCAACTAAACAAAAGAAG |
| | AGCTGTATCCATTAAGTCAAGAAGC |
| | (SEQ ID NO: 266) |
| MALAT-1 | GATTCGTCAGTAGGGTTGTAAAGGT |
| | TTTTCTTTTCCTGAGAAAACAACCT |
| | TTTGTTTTCTCAGGTTTTGCTTTTT |
| | GGCCTTTCCCTAGCTTTAAAAAAAA |
| | AAAAGCAAAAGACGCTGGTGGCTGG |
| | CACTCCTGGTTTCCAGGACGGGGTT |
| | CAAGTCCCTGCGGTGTCTTTGCTT |
| | (SEQ ID NO: 267) |
| MALAT-comp14 | AAAGGTTTTTCTTTTCCTGAGAAAT |
| | TTCTCAGGTTTTGCTTTTTAAAAAA |
| | AAAGCAAAAGACGCTGGTGGCTGGC |
| | ACTCCTGGTTTCCAGGACGGGGTTC |
| | AAGTCCCTGCGGTGTCTTTGCTT |
| | (SEQ ID NO: 268) |

[0209] In certain embodiments, the Gar1 promoter is coupled with a viral intron (e.g., an SV40i intron, a MVM intron, a Mv2 intron, an HNRNPH1 intron, chimeric introns or synthetic introns).

[0210] In certain embodiments, the Gar1 promoter does not comprise a viral promoter and/or a synthetic promoter.

[0211] In certain embodiments, the Gar1 promoter comprises at least 95%, 98%, 99%, 99.5% or 100% identity to a naturally-occurring mammalian promoter. In certain embodiments, the compact promoter comprises at least 95%, 98%, 99%, 99.5% or 100% identity to a naturally-occurring human promoter.

[0212] The expression level of a Gar1 promoter can be determined by expressing a reporter molecule in a cell, e.g., a human embryonic kidney (HEK) cell line or an N2A cell line. In certain embodiments, the compact promoter is capable of expressing a luciferase reporter at a higher level than is a HSK thymidine kinase (TK) promoter.

### Other Bidirectional Promoters

[0213] Using the custom perl script described above, additional bidirectional promoters were identified that can be used according to the methods described herein. In certain embodiments, the promoter is a bidirectional promoter comprising a nucleotide sequence having at least 85%, 90%, 95%, 96%, 97%, 98%, 99%, or 100% identity of any one of SEQ ID NOs: 204-255 or a codon-optimized variant and/or fragment thereof. In some embodiments, the bidirectional promoter comprises the nucleotide sequence of any one of SEQ ID NOs: 204-255 or a codon-optimized variant and/or fragment thereof.

[0214] In certain embodiments, a functional fragment comprises a truncation of from about 10 bases to about 70 bases at the 5′ end, the 3′ end, or both the 5′ and 3′ ends of any one of SEQ ID NOs: 204-255 or a variant thereof (e.g., a variant having at least 85%, 90%, 95%, 96%, 97%, 98%, 99%, or 100% identity to any one of SEQ ID NOs: 204-255). In certain embodiments, a functional fragment comprises a truncation of about 10 bases at the 5′ end, the 3′ end, or both the 5′ and 3′ ends of any one of SEQ ID NOs: 204-255 or a variant thereof (e.g., a variant having at least 85%, 90%, 95%, 96%, 97%, 98%, 99%, or 100% identity to any one of SEQ ID NOs: 204-255). In certain embodiments, a functional fragment comprises a truncation of about 20 bases at the 5′ end, the 3′ end, or both the 5′ and 3′ ends of any one of SEQ ID NOs: 204-255 or a variant thereof (e.g., a variant having at least 85%, 90%, 95%, 96%, 97%, 98%, 99%, or 100% identity to any one of SEQ ID NOs: 204-255). In certain embodiments, a functional fragment comprises a truncation of about 30 bases at the 5′ end, the 3′ end, or both the 5′ and 3′ ends of any one of SEQ ID NOs: 204-255 or a variant thereof (e.g., a variant having at least 85%, 90%, 95%, 96%, 97%, 98%, 99%, or 100% identity to any one of SEQ ID NOs: 204-255). In certain embodiments, a functional fragment comprises a truncation of about 40 bases at the 5′ end, the 3′ end, or both the 5′ and 3′ ends of any one of SEQ ID NOs: 204-255 or a variant thereof (e.g., a variant having at least 85%, 90%, 95%, 96%, 97%, 98%, 99%, or 100% identity to any one of SEQ ID NOs: 204-255). In certain embodiments, a functional fragment comprises a truncation of about 50 bases at the 5′ end, the 3′ end, or both the 5′ and 3′ ends of any one of SEQ ID NOs: 204-255 or a variant thereof (e.g., a variant having at least 85%, 90%, 95%, 96%, 97%, 98%, 99%, or 100% identity to any one of SEQ ID NOs: 204-255). In certain embodiments, a functional fragment comprises a truncation of about 60 bases at the 5′ end, the 3′ end, or both the 5′ and 3′ ends of any one of SEQ ID NOs: 204-255 or a variant thereof (e.g., a variant having at least 85%, 90%, 95%, 96%, 97%, 98%, 99%, or 100% identity to any one of SEQ ID NOs: 204-255). In certain embodiments, a functional fragment comprises a truncation of about 70 bases at the 5′ end, the 3′ end, or both the 5′ and 3′ ends of any one of SEQ ID NOs: 204-255 or a variant thereof (e.g., a variant having at least 85%, 90%, 95%, 96%, 97%, 98%, 99%, or 100% identity to any one of SEQ ID NOs: 204-255).

[0215] In certain embodiments, the functional fragment comprise at least a transcription factor binding site. Identification of transcription factor binding sites can be determined by consensus, or by using a differential distance matrix or multidimensional scaling (De Bleser P. et al. (2007) Genome Biol 8(5):R83.

[0216] In certain embodiments, the promoter comprises a TATA mutation. In certain embodiments, the TATA mutation is a TATAA→TCGAA mutation.

[0217] In certain embodiments, the promoter is not one or more of an SRP-RPS29 promoter (SEQ ID NO: 241), a 7sk1 promoter (SEQ ID NO: 242), a 7sk2 promoter (SEQ ID NO: 243), a 7sk3 promoter (SEQ ID NO: 244), an RMRP-CCDC107 promoter (SEQ ID NO: 245), an ALOXE3 promoter (SEQ ID NO: 246), a CGB1 promoter (SEQ ID NO: 247), a CGB2 promoter (SEQ ID NO: 248), a Med16-1 promoter (SEQ ID NO: 249), a Med16-2 promoter (SEQ ID NO: 250), a DPP9-1 promoter (SEQ ID NO: 251), a DPP9-2 promoter (SEQ ID NO: 252), a DPP9-3 promoter (SEQ ID NO: 253), a SNORD13-C8orf41 promoter (SEQ ID NO: 254), and a THEM259 promoter (SEQ ID NO: 255).

[0218] In certain embodiments, a nucleic acid comprising a bidirectional promoter described herein further comprises a 5′UTR including at least a portion of a beta-globin 5′UTR sequence or a Kozak sequence. In certain embodiments, the 5′UTR includes the nucleotide sequence 5′-GCCGCCACC-3′ (SEQ ID NO: 256), or a 6 bp, a 7 bp, or an 8 bp fragment thereof. In certain embodiments, the 6 bp fragment is 5′-GCCACC-3′ (SEQ ID NO: 257).

[0219] In certain embodiments, a nucleic acid comprising a bidirectional promoter described herein further comprises a terminator sequence. In certain embodiments, the terminator sequence comprises one of the terminator sequences in TABLE 18.

TABLE 18

| | |
|---|---|
| a synthetic | AATAAAATATCTTTATTTTCATTAC |
| poly(A) | ATCTGTGTGTTGGTTTTTTGTGTG |
| sequence (SPA) | (SEQ ID NO: 258) |
| SPA and Pause | AATAAAATATCTTTATTTTCATTAC |
| | ATCTGTGTGTTGGTTTTTTGTGTGA |
| | ATCGATAGTACTAACATACGCTCTC |
| | CATCAAAACAAAACGAAACAAAACA |
| | AACTAGCAAAATAGGCTGTCCCCAG |
| | TGCAAGTGCAGGTGCCAGAACATTT |
| | CTCT |
| | (SEQ ID NO: 259); |
| SV40 (240 bp) | ATCTAGATAACTGATCATAATCAGC |
| | CATACCACATTTGTAGAGGTTTTAC |
| | TTGCTTTAAAAAACCTCCCACACCT |
| | CCCCCTGAACCTGAAACATAAAATG |
| | AATGCAATTGTTGTTGTTAACTTGT |
| | TTATTGCAGCTTATAATGGTTACAA |
| | ATAAAGCAATAGCATCACAAATTTC |
| | ACAAATAAAGCATTTTTTTCACTGC |
| | ATTCTAGTTGTGGTTTGTCCAAACT |
| | CATCAATGTATCTTA |
| | (SEQ ID NO: 260) |
| SV 40-mini | TTGTTTATTGCAGCTTATAATGGTT |
| (120 bp) | ACAAATAAAGCAATAGCATCACAAA |
| | TTTCACAAATAAAGCATTTTTTTCA |
| | CTGCATTCTAGTTGTGGTTTGTCCA |
| | AACTCATCAATGTATCTTAT |
| | (SEQ ID NO: 261) |
| bGH poly A | CGACTGTGCCTTCTAGTTGCCAGCC |
| | ATCTGTTGTTTGCCCCTCCCCCGTG |
| | CCTTCCTTGACCCTGGAAGGTGCCA |
| | CTCCCACTGTCCTTTCCTAATAAAA |
| | TGAGGAAATTGCATCGCATTGTCTG |
| | AGTAGGTGTCATTCTATTCTGGGGG |
| | GTGGGGTGGGGCAGGACAGCAAGGG |
| | GGAGGATTGGGAAGACAATAGCAGG |
| | CATGCTGGGGATGCGGTGGGCTCTA |
| | TGG |
| | (SEQ ID NO: 262) |
| TKpoly A | GGGGGAGGCTAACTGAAACACGGAA |
| | GGAGACAATACCGGAAGGAACCCGC |
| | GCTATGACGGCAATAAAAAGACAGA |
| | ATAAAACGCACGGGTGTTGGGTCGT |
| | TTGTTCATAAACGCGGGGTTCGGTC |
| | CCAGGGCTGGCACTCTGTCGATACC |
| | CCACCGAGACCCCATTGGGGCCAAT |
| | ACGCCCGCGTTTCTTCCTTTTCCCC |
| | ACCCCACCCCCCAAGTTCGGGTGAA |
| | GGCCCAGGGCTCGCAGCCAACGTCG |
| | GGGCGGCAGGCCCTGCCATAG |
| | (SEQ ID NO: 263) |
| SNRPl | GGTATCAAATAAAATACGAAATGTG |
| | ACAGATT |
| | (SEQ ID NO: 264) |
| SNRPla | AAATAAAATACGAAATGTGACAGAT |
| | T |
| | (SEQ ID NO: 265) |
| Histone H4B | GGTTGCTGATTTCTCCACAGCTTGC |
| | ATTTCTGAACCAAAGGCCCTTTTCA |
| | GGGCCGCCCAACTAAACAAAAGAAG |
| | AGCTGTATCCATTAAGTCAAGAAGC |
| | (SEQ ID NO: 266) |
| MALAT-1 | GATTCGTCAGTAGGGTTGTAAAGGT |
| | TTTTCTTTTCCTGAGAAAACAACCT |
| | TTTGTTTTCTCAGGTTTTGCTTTTT |
| | GGCCTTTCCCTAGCTTTAAAAAAAA |
| | AAAAGCAAAAGACGCTGGTGGCTGG |
| | CACTCCTGGTTTCCAGGACGGGGTT |
| | CAAGTCCCTGCGGTGTCTTTGCTT |
| | (SEQ ID NO: 267) |
| MALAT-comp14 | AAAGGTTTTTCTTTTCCTGAGAAAT |
| | TTCTCAGGTTTTGCTTTTTAAAAAA |
| | AAAGCAAAAGACGCTGGTGGCTGGC |
| | ACTCCTGGTTTCCAGGACGGGGTTC |
| | AAGTCCCTGCGGTGTCTTTGCTT |
| | (SEQ ID NO: 268) |

[0220] In certain embodiments, the bidirectional promoter is coupled with a viral intron (e.g., an SV40i intron, a MVM intron, a Mv2 intron, an HNRNPH1 intron, chimeric introns or synthetic introns).

[0221] In certain embodiments, the bidirectional promoter does not comprise a viral promoter and/or a synthetic promoter. In certain embodiments, the compact promoter does not comprise F5tg83.

[0222] In certain embodiments, the bidirectional promoter comprises at least 95%, 98%, 99%, 99.5% or 100% identity to a naturally-occurring mammalian promoter. In certain embodiments, the compact promoter comprises at least 95%, 98%, 99%, 99.5% or 100% identity to a naturally-occurring human promoter.

[0223] The expression level of a bidirectional promoter can be determined by expressing a reporter molecule in a cell, e.g., a human embryonic kidney (HEK) cell line or an N2A cell line. In certain embodiments, the compact promoter is capable of expressing a luciferase reporter at a higher level than is a HSK thymidine kinase (TK) promoter.

### III. Nuclease Systems

[0224] In general, a “nuclease system” refers collectively to transcripts and other elements involved in the expression of or directing the activity of a gene encoding a gene-editing nuclease (e.g., a Cas nuclease) and a guide sequence (also referred to as a “spacer” in the context of certain endogenous gene editing systems, e.g., a CRISPR system).

[0225] In general, “CRISPR system” refers collectively to transcripts and other elements involved in the expression of or directing the activity of CRISPR-associated (“Cas”) genes, including sequences encoding a Cas gene, a guide sequence (also referred to as a “spacer” in the context of an endogenous CRISPR system), or other sequences and transcripts from a CRISPR locus. In some embodiments, one or more elements of a CRISPR system is derived from a type I, type II, or type III CRISPR system. In some embodiments, one or more elements of a CRISPR system is derived from a particular organism comprising an endogenous CRISPR system, such as Streptococcus pyogenes. In general, a CRISPR system is characterized by elements that promote the formation of a CRISPR complex at the site of a target sequence (also referred to as a protospacer in the context of an endogenous CRISPR system).

[0226] As used herein, “target sequence” refers to a sequence to which a guide sequence is designed to have complementarity, where hybridization between a target sequence and a guide sequence promotes the formation of a gene editing nuclease complex (e.g., a CRISPR complex). Full complementarity is not necessarily required, provided there is sufficient complementarity to cause hybridization and promote formation of a gene editing nuclease complex (e.g., a CRISPR complex). A target sequence may comprise any polynucleotide, such as DNA or RNA polynucleotides. In some embodiments, a target sequence is located in the nucleus or cytoplasm of a cell. In some embodiments, the target sequence may be within an organelle of a eukaryotic cell, for example, mitochondrion or chloroplast. A sequence or template that may be used for recombination into the targeted locus comprising the target sequences is referred to as an “editing template” or “editing polynucleotide” or “editing sequence”. In aspects of the presently disclosed subject matter, an exogenous template polynucleotide may be referred to as an editing template. In an aspect of the presently disclosed subject matter the recombination is homologous recombination.

[0227] In some embodiments, a vector comprises one or more insertion sites, such as a restriction endonuclease recognition sequence (also referred to as a “cloning site”). In some embodiments, one or more insertion sites (e.g. about or more than about 1, 2, 3, 4, 5, 6, 7, 8, 9, 10, or more insertion sites) are located upstream and/or downstream of one or more sequence elements of one or more vectors. When multiple different guide sequences are used, a single expression construct may be used to target nuclease activity to multiple different, corresponding target sequences within a cell. For example, a single vector may comprise about or more than about 1, 2, 3, 4, 5, 6, 7, 8, 9, 10, 15, 20, or more guide sequences. In some embodiments, about or more than about 1, 2, 3, 4, 5, 6, 7, 8, 9, 10, more such guide-sequence-containing vectors may be provided, and optionally delivered to a cell.

[0228] In some embodiments, a vector comprises a regulatory element operably linked to an enzyme-coding sequence encoding a nuclease, such as a CRISPR enzyme (e.g., a Cas protein). Non-limiting examples of Cas proteins include Cas1, Cas1B, Cas2, Cas3, Cas4, Cas5, Cas6, Cas7, Cas8, Cas9 (also known as Csn1 and Csx12), Cas10, Csy1, Csy2, Csy3, Cse1, Cse2, Csc1, Csc2, Csa5, Csn2, Csm2, Csm3, Csm4, Csm5, Csm6, Cmr1, Cmr3, Cmr4, Cmr5, Cmr6, Csb1, Csb2, Csb3, Csx17, Csx14, Csx10, Csx16, CsaX, Csx3, Csx1, Csx15, Csf1, Csf2, Csf3, Csf4, homologs thereof, or modified versions thereof. These enzymes are known: for example, the amino acid sequence of S. pyogenes Cas9 protein may be found in the SwissProt database under accession number Q99ZW2. In some embodiments, the unmodified CRISPR enzyme has DNA cleavage activity, such as Cas9. In some embodiments the CRISPR enzyme is Cas9, and may be Cas9 from S. pyogenes or S. pneumoniae.

[0229] In some embodiments, the nuclease can be any endonuclease that is capable of cleaving DNA to effect a single or double strand break at the intended locus. For example, the nuclease can be a MAD1, MAD2, MAD3, MAD4, MAD5, MAD6, MAD7, MAD8, MAD9 MAD10, MAD11, or MAD11 endonuclease (see, e.g., U.S. Pat. No. 9,982,279). The DNA endonuclease can be a Cpf1 endonuclease: a homolog thereof, a recombinant of the naturally occurring molecule thereof, a codon-optimized version thereof, a modified version thereof (e.g., a mutated variant such as a nickase), and combinations of any of the foregoing. For example, in some embodiments, the DNA endonuclease is a Cas9 or Cpf1 endonuclease that effects a single-strand break (SSB) or double-strand break (DSB) at a locus within or near a target sequence.

[0230] In some embodiments, the DNA endonuclease is a Cas9 endonuclease (e.g., a recombinant Cas9, a codon-optimized Cas9, a modified or mutated Cas9). The Cas9 endonuclease can be derived from a variety of bacterial species. For example, in certain embodiments, the Cas9 endonuclease is derived from Streptococcus thermophiles, Streptococcus pyogenes. Neisseria meningitides. Staphylococcus aureus, or Treponema denticola. In a specific embodiment, the Cas9 endonuclease is derived from Staphylococcus aureus (SaCas9). In another specific embodiment, the Cas9) endonuclease is derived from Streptococcus pyogenes (SpCas9). Wild type Cas9 has two active sites (RuvC and HNH nuclease domains) for cleaving DNA, one for each strand of the double helix. However, nickase variants of Cas9 are readily available (e.g., Addgene, plasmid #: 48873) that are only capable of cleaving one strand of the DNA due to catalytic inactivation of the RuvC or HNH nuclease domains. Accordingly, in a specific embodiment, the Cas9 endonuclease is a mutated SpCas9 endonuclease (e.g., a nickase) and/or a codon-optimized version thereof.

[0231] In other embodiments, the DNA endonuclease is a Cpf1 endonuclease (e.g., a recombinant Cpf1, a codon-optimized Cpf1, a modified or mutated Cpf1). The Cpf1 endonuclease can be derived from a variety of bacterial species. For example, in certain embodiments, the Cpf1 endonuclease is derived from Acidaminococcus bacteria or Lachnospiraceae bacteria. In a specific embodiment, the Cpf1 endonuclease is a Lachnospiraceae bacterium ND2006 Cpf1.

[0232] In other embodiments, the DNA endonuclease is a MAD7 endonuclease (e.g., a recombinant MAD7, a codon-optimized MAD7, a modified or mutated MAD7). MAD7 is a codon optimized endonuclease can be derived from Eubacterium rectale (Inscripta, Boulder, CO.) MAD7 is described in U.S. Pat. No. 9,982,279.

[0233] In other embodiments, an RNA-guided nuclease is used. Exemplary RNA-guided nucleases include Cas13a, Cas13b and Cas13d.

[0234] In some embodiments, the nuclease (e.g., a CRISPR) directs cleavage of one or both strands at the location of a target sequence, such as within the target sequence and/or within the complement of the target sequence. In some embodiments, the nuclease directs cleavage of one or both strands within about 1, 2, 3, 4, 5, 6, 7, 8, 9, 10, 15, 20, 25, 50, 100, 200, 500, or more base pairs from the first or last nucleotide of a target sequence. In some embodiments, a vector encodes a nuclease that is mutated to with respect to a corresponding wild-type enzyme such that the mutated nuclease lacks the ability to cleave one or both strands of a target polynucleotide containing a target sequence. For example, in certain embodiments, a nuclease system comprises a nuclease-dead version of a nuclease (e.g., Cas9 (dCas9)) (Qi et al. (2013) CELL 152, 1173-1183; Gilbert et al. (2013) CELL 154, 442-451: Larson et al. (2013) NATURE PROTOCOLS 8, 2180-2196: Fuller et al. (2014) ADVANCES IN EXPERIMENTAL MEDICINE AND BIOLOGY 801, 773-781). Instead of inducing cleavage, a nuclease-dead nuclease stays bound tightly to a target sequence. When targeted to an actively transcribed gene, inhibition of pol II progression through a steric hindrance mechanism can lead to efficient transcriptional repression. Thus, use of a nuclease-dead nuclease can achieve therapeutic repression of a target gene without inducing a break in the target nucleotide sequence.

[0235] In some embodiments, an enzyme coding sequence encoding a CRISPR enzyme is codon optimized for expression in particular cells, such as eukaryotic cells. The eukaryotic cells may be those of or derived from a particular organism, such as a mammal, including but not limited to human, mouse, rat, rabbit, dog, or non-human primate. In general, codon optimization refers to a process of modifying a nucleic acid sequence for enhanced expression in the host cells of interest by replacing at least one codon (e.g. about or more than about 1, 2, 3, 4, 5, 10, 15, 20, 25, 50, or more codons) of the native sequence with codons that are more frequently or most frequently used in the genes of that host cell while maintaining the native amino acid sequence. Various species exhibit particular bias for certain codons of a particular amino acid. Codon bias (differences in codon usage between organisms) often correlates with the efficiency of translation of messenger RNA (mRNA), which is in turn believed to be dependent on, among other things, the properties of the codons being translated and the availability of particular transfer RNA (tRNA) molecules. The predominance of selected tRNAs in a cell is generally a reflection of the codons used most frequently in peptide synthesis. Accordingly, genes can be tailored for optimal gene expression in a given organism based on codon optimization. Codon usage tables are readily available, for example, at the “Codon Usage Database”, and these tables can be adapted in a number of ways. See Nakamura et al. (2000) NUCL. ACIDS RES. 28:292. Computer algorithms for codon optimizing a particular sequence for expression in a particular host cell are also available, such as Gene Forge (Aptagen: Jacobus, Pa.), are also available. In some embodiments, one or more codons (e.g. 1, 2, 3, 4, 5, 10, 15, 20, 25, 50, or more, or all codons) in a sequence encoding a CRISPR enzyme correspond to the most frequently used codon for a particular amino acid.

[0236] In general, a guide sequence is any polynucleotide sequence having sufficient complementarity with a target polynucleotide sequence to hybridize with the target sequence and direct sequence-specific binding of a CRISPR complex to the target sequence. In some embodiments, the degree of complementarity between a guide sequence and its corresponding target sequence, when optimally aligned using a suitable alignment algorithm, is about or more than about 50%, 60%, 75%, 80%, 85%, 90%, 95%, 97.5%, 99%, or more. Optimal alignment may be determined with the use of any suitable algorithm for aligning sequences, non-limiting example of which include the Smith-Waterman algorithm, the Needleman-Wunsch algorithm, algorithms based on the Burrows-Wheeler Transform (e.g. the Burrows Wheeler Aligner), ClustalW, Clustal X, BLAT, Novoalign (Novocraft Technologies, ELAND (Illumina, San Diego, Calif.), SOAP (available at soap.genomics.org.cn), and Maq (available at maq.sourceforge.net). In some embodiments, a guide sequence is about or more than about 5, 10, 11, 12, 13, 14, 15, 16, 17, 18, 19, 20, 21, 22, 23, 24, 25, 26, 27, 28, 29, 30, 35, 40, 45, 50, 75, or more nucleotides in length. In some embodiments, a guide sequence is less than about 75, 50, 45, 40, 35, 30, 25, 20, 15, 12, or fewer nucleotides in length.

[0237] The ability of a guide sequence to direct sequence-specific binding of a CRISPR complex to a target sequence may be assessed by any suitable assay. For example, the components of a CRISPR system sufficient to form a CRISPR complex, including the guide sequence to be tested, may be provided to a host cell having the corresponding target sequence, such as by transfection with vectors encoding the components of the CRISPR sequence, followed by an assessment of preferential cleavage within the target sequence, such as by Surveyor assay as described herein. Similarly, cleavage of a target polynucleotide sequence may be evaluated in a test tube by providing the target sequence, components of a CRISPR complex, including the guide sequence to be tested and a control guide sequence different from the test guide sequence, and comparing binding or rate of cleavage at the target sequence between the test and control guide sequence reactions. Other assays are possible, and will occur to those skilled in the art.

[0238] A guide sequence may be selected to target any target sequence. In some embodiments, the target sequence is a sequence within a genome of a cell. Exemplary target sequences include those that are unique in the target genome.

[0239] In some embodiments, the CRISPR enzyme is part of a fusion protein comprising one or more heterologous protein domains (e.g. about or more than about 1, 2, 3, 4, 5, 6, 7, 8, 9, 10, or more domains in addition to the CRISPR enzyme). A CRISPR enzyme fusion protein may comprise any additional protein sequence, and optionally a linker sequence between any two domains. Examples of protein domains that may be fused to a CRISPR enzyme include, without limitation, epitope tags, reporter gene sequences, and protein domains having one or more of the following activities: methylase activity, demethylase activity, transcription activation activity, transcription repression activity, transcription release factor activity, histone modification activity, RNA cleavage activity and nucleic acid binding activity. Non-limiting examples of epitope tags include histidine (His) tags, V5 tags, FLAG tags, influenza hemagglutinin (HA) tags, Myc tags, VSV-G tags, and thioredoxin (Trx) tags. Examples of reporter genes include, but are not limited to, glutathione-5-transferase (GST), horseradish peroxidase (HRP), chloramphenicol acetyltransferase (CAT) beta-galactosidase, beta-glucuronidase, luciferase, green fluorescent protein (GFP), HcRed, DsRed, cyan fluorescent protein (CFP), yellow fluorescent protein (YFP), and autofluorescent proteins including blue fluorescent protein (BFP). A CRISPR enzyme may be fused to a gene sequence encoding a protein or a fragment of a protein that bind DNA molecules or bind other cellular molecules, including but not limited to maltose binding protein (MBP), S-tag, Lex A DNA binding domain (DBD) fusions, GAL4A DNA binding domain fusions, and herpes simplex virus (HSV) BP16 protein fusions. Additional domains that may form part of a fusion protein comprising a CRISPR enzyme are described in US20110059502, incorporated herein by reference. In some embodiments, a tagged CRISPR enzyme is used to identify the location of a target sequence.

[0240] In an aspect of the presently disclosed subject matter, a reporter gene which includes but is not limited to glutathione-5-transferase (GST), horseradish peroxidase (HRP), chloramphenicol acetyltransferase (CAT) beta-galactosidase, beta-glucuronidase, luciferase, green fluorescent protein (GFP), HcRed, DsRed, cyan fluorescent protein (CFP), yellow fluorescent protein (YFP), and autofluorescent proteins including blue fluorescent protein (BFP), may be introduced into a cell to encode a gene product which serves as a marker by which to measure the alteration or modification of expression of the gene product. In a further embodiment of the presently disclosed subject matter, the DNA molecule encoding the gene product may be introduced into the cell via a vector. In a preferred embodiment of the presently disclosed subject matter the gene product is luciferase. In a further embodiment of the presently disclosed subject matter the expression of the gene product is decreased.

### IV. Vector Systems

[0241] Several aspects of the presently disclosed subject matter relate to vector systems comprising one or more vectors, or vectors as such. Vectors can be designed for expression of CRISPR transcripts (e.g. nucleic acid transcripts, proteins, or enzymes) in prokaryotic or eukaryotic cells. For example, CRISPR transcripts can be expressed in bacterial cells such as Escherichia coli, insect cells (using baculovirus expression vectors), yeast cells, or mammalian cells. Suitable host cells are discussed further in Goeddel (1990) Gene Expression Technology: Methods in Enzymology 185, Academic Press, San Diego, Calif. Alternatively, the recombinant expression vector can be transcribed and translated in vitro, for example using T7 promoter regulatory sequences and T7 polymerase.

[0242] Vectors may be introduced and propagated in a prokaryote. In some embodiments, a prokaryote is used to amplify copies of a vector to be introduced into a eukaryotic cell or as an intermediate vector in the production of a vector to be introduced into a eukaryotic cell (e.g. amplifying a plasmid as part of a viral vector packaging system). In some embodiments, a prokaryote is used to amplify copies of a vector and express one or more nucleic acids, such as to provide a source of one or more proteins for delivery to a host cell or host organism. Expression of proteins in prokaryotes is most often carried out in Escherichia coli with vectors containing constitutive or inducible promoters directing the expression of either fusion or non-fusion proteins.

[0243] Fusion vectors add a number of amino acids to a protein encoded therein, such as to the amino terminus of the recombinant protein. Such fusion vectors may serve one or more purposes, such as: (i) to increase expression of recombinant protein: (ii) to increase the solubility of the recombinant protein: and (iii) to aid in the purification of the recombinant protein by acting as a ligand in affinity purification. Often, in fusion expression vectors, a proteolytic cleavage site is introduced at the junction of the fusion moiety and the recombinant protein to enable separation of the recombinant protein from the fusion moiety subsequent to purification of the fusion protein. Such enzymes, and their cognate recognition sequences, include Factor Xa, thrombin and enterokinase. Example fusion expression vectors include pGEX (Pharmacia Biotech Inc: Smith and Johnson (1988) GENE 67:31-40), pMAL (New England Biolabs, Beverly, Mass.) and pRIT5 (Pharmacia, Piscataway N.J.) that fuse glutathione S-transferase (GST), maltose E binding protein, or protein A, respectively, to the target recombinant protein.

[0244] Examples of suitable inducible non-fusion E. coli expression vectors include pTrc (Amrann et al. (1988) GENE 69:301-315) and pET 11d (Studier et al. (1990) Gene Expression Technology: Methods in Enzymology 185, Academic Press, San Diego, Calif.).

[0245] In some embodiments, a vector is a yeast expression vector. Examples of vectors for expression in yeast Saccharomyces cerevisiae include pYepSec1 (Baldari, et al. (1987) EMBO J. 6:229-234), pMFa (Kuijan and Herskowitz (1982) CELL 30: 933-943), pJRY88 (Schultz et al. (1987) GENE 54:113-123), pYES2 (Invitrogen Corporation, San Diego, Calif.), and picZ (InVitrogen Corp, San Diego, Calif.).

[0246] In some embodiments, a vector is capable of driving expression of one or more sequences in mammalian cells using a mammalian expression vector. Examples of mammalian expression vectors include pCDM8 (Seed (1987) NATURE 329:840) and pMT2PC (Kaufman et al. (1987) EMBO J. 6:187-195). When used in mammalian cells, the expression vector's control functions are typically provided by one or more regulatory elements. For example, commonly used promoters are derived from polyoma, adenovirus 2, cytomegalovirus, simian virus 40, and others disclosed herein and known in the art. For other suitable expression systems for both prokaryotic and eukaryotic cells see, e.g., Chapters 16 and 17 of Sambrook et al. (1989) Molecular Cloning: A Laboratory Manual. 2nd ed., Cold Spring Harbor Laboratory, Cold Spring Harbor Laboratory Press, Cold Spring Harbor, N.Y.

[0247] In some embodiments, the recombinant mammalian expression vector is capable of directing expression of the nucleic acid preferentially in a particular cell type (e.g., tissue-specific regulatory elements are used to express the nucleic acid). Tissue-specific regulatory elements are known in the art. Non-limiting examples of suitable tissue-specific promoters include the albumin promoter (liver-specific: Pinkert et al. (1987) GENES DEV. 1:268-277), lymphoid-specific promoters (Calame and Eaton (1988) ADV. IMMUNOL. 43:235-275), in particular promoters of T cell receptors (Winoto and Baltimore (1989) EMBO J. 8:729-733) and immunoglobulins (Baneiji et al. (1983) CELL 33:729-740: Queen and Baltimore (1983) CELL 33:741-748) neuron-specific promoters (e.g., the neurofilament promoter: Byrne and Ruddle (1989) PROC. NATL. ACAD. SCI. USA 86:5473-5477), pancreas-specific promoters (Edlund et al. (1985) SCIENCE 230:912-916), and mammary gland-specific promoters (e.g., milk whey promoter: U.S. Pat. No. 4,873,316 and European Application Publication. No. 264,166). Developmentally-regulated promoters are also encompassed, e.g., the murine hox promoters (Kessel and Gruss (1990) SCIENCE 249: 374-379) and the .alpha.-fetoprotein promoter (Campes and Tilghman (1989) GENES DEV. 3:537-546).

[0248] In some embodiments, a regulatory element is operably linked to one or more elements of a CRISPR system so as to drive expression of the one or more elements of the CRISPR system. In general, CRISPRs (Clustered Regularly Interspaced Short Palindromic Repeats), also known as SPIDRs (SPacer Interspersed Direct Repeats), constitute a family of DNA loci that are usually specific to a particular bacterial species. The CRISPR locus comprises a distinct class of interspersed short sequence repeats (SSRs) that were recognized in E. coli (Ishino et al. (1987) J. BACTERIOL., 169:5429-5433; and Nakata et al. (1989) J. BACTERIOL., 171:3553-3556), and associated genes. Similar interspersed SSRs have been identified in Haloferax mediterranei, Streptococcus pyogenes, Anabaena, and Mycobacterium tuberculosis (Groenen et al. (1993) MOL. MICROBIOL., 10:1057-1065; Hoe et al. (1999) EMERG. INFECT. DIS., 5:254-263: Masepohl et al. (1996) BIOCHIM. BIOPHYS. ACTA 1307:26-30; and Mojica et al. (1995) MOL. MICROBIOL., 17:85-93). The CRISPR loci typically differ from other SSRs by the structure of the repeats, which have been termed short regularly spaced repeats (SRSRs) (Janssen et al. (2002) OMICS J. INTEG. BIOL., 6:23-33; and Mojica et al. (2000) MOL. MICROBIOL., 36:244-246). In general, the repeats are short elements that occur in clusters that are regularly spaced by unique intervening sequences with a substantially constant length (Mojica et al. (2000) MOL. MICROBIOL., 36:244-246). Although the repeat sequences are highly conserved between strains, the number of interspersed repeats and the sequences of the spacer regions typically differ from strain to strain (van Embden et al. (2000) J. BACTERIOL., 182:2393-2401). CRISPR loci have been identified in more than 40 prokaryotes (e.g., Jansen et al. (2002) MOL. MICROBIOL., 43:1565-1575: and Mojica et al. (2005) J. Mol. Evol. 60:174-82) including, but not limited to Aeropyrum, Pyrobaculum, Sulfolobus, Archaeoglobus, Halocarcula, Methanobacterium, Methanococcus, Methanosarcina, Methanopyrus, Pyrococcus, Picrophilus, Thernioplasnia, Corynebacterium, Mycobacterium, Streptomyces, Aquifrx, Porphyromonas, Chlorobium. Thermus, Bacillus, Listeria, Staphylococcus, Clostridium, Thermoanaerobacter, Mycoplasma, Fusobacterium, Azarcus, Chromobacterium, Neisseria, Nitrosomonas, Desulfovibrio, Geobacter, Myrococcus, Campylobacter, Wolinella, Acinetobacter, Erwinia, Escherichia, Legionella, Methylococcus, Pasteurella, Photobacterium, Salmonella, Xanthomonuas, Yersinia, Treponema, and Thermotoga.

### V. Construction of rAAV Vectors

[0249] The disclosure provides recombinant AAV (rAAV) vectors comprising a nuclease system under the control of a suitable promoter (e.g., a compact bidirectional promoter) to direct the expression of the gRNA and nuclease. The disclosure further provides a therapeutic composition comprising an rAAV vector comprising a nuclease system under the control of a suitable promoter (e.g., a compact bidirectional promoter). A variety of rAAV vectors may be used to deliver the desired complement system gene to the appropriate cells and/or tissues and to direct its expression. More than 30 naturally occurring serotypes of AAV from humans and non-human primates are known. Many natural variants of the AAV capsid exist, and an rAAV vector of the disclosure may be designed based on an AAV with properties specifically suited for expression in the cells and/or tissues relevant for the nuclease system to be expressed.

[0250] In general, an rAAV vector is comprised of, in order, a 5′ adeno-associated virus inverted terminal repeat, a transgene or gene of interest encoding a nuclease system operably linked to a sequence which regulates its expression in a target cell, and a 3′ adeno-associated virus inverted terminal repeat. In addition, the rAAV vector may preferably have a polyadenylation sequence. Generally, rAAV vectors should have one copy of the AAV ITR at each end of the transgene or gene of interest, in order to allow replication, packaging, and efficient integration into cell chromosomes. Within preferred embodiments of the disclosure, the transgene sequence encoding a complement system polypeptide (or a functional fragment or variant thereof) or a biologically active fragment thereof will be of about 2 to 5 kb in length (or alternatively, the transgene may additionally contain a “stuffer” or “filler” sequence to bring the total size of the nucleic acid sequence between the two ITRs to between 2 and 5 kb).

[0251] Recombinant AAV vectors of the present disclosure may be generated from a variety of adeno-associated viruses. For example, ITRs from any AAV serotype are expected to have similar structures and functions with regard to replication, integration, excision and transcriptional mechanisms. Examples of AAV serotypes include AAV1, AAV2, AAV3, AAV4, AAV5, AAV6, AAV7, AAV8, AAV9, AAV10, AAV11 and AAV12. In some embodiments, the rAAV vector is generated from serotype AAV1, AAV2, AAV4, AAV5, or AAV8. These serotypes are known to target photoreceptor cells or the retinal pigment epithelium. In particular embodiments, the rAAV vector is generated from serotype AAV2. In certain embodiments, the AAV serotypes include AAVrh8, AAVrh8R or AAVrh10. It will also be understood that the rAAV vectors may be chimeras of two or more serotypes selected from serotypes AAV 1 through AAV12. The tropism of the vector may be altered by packaging the recombinant genome of one serotype into capsids derived from another AAV serotype. In some embodiments, the ITRs of the rAAV virus may be based on the ITRs of any one of AAV 1-12 and may be combined with an AAV capsid selected from any one of AAV1-12, AAV-DJ, AAV-DJ8, AAV-DJ9 or other modified serotypes. In certain embodiments, any AAV capsid serotype may be used with the vectors of the disclosure.

[0252] Examples of AAV serotypes include AAV1, AAV2, AAV3, AAV4, AAV5, AAV6, AAV7, AAV8, AAV9, AAV10, AAV11, AAV 12, AAV-DJ, AAV-DJ8, AAV-DJ9, AAVrh8, AAVrh8R or AAVrh10. In certain embodiments, the AAV capsid serotype is AAV2.

[0253] Desirable AAV fragments for assembly into vectors may include the cap proteins, including the vp 1, vp2, vp3 and hypervariable regions, the rep proteins, including rep 78, rep 68, rep 52, and rep 40, and the sequences encoding these proteins. These fragments may be readily utilized in a variety of vector systems and host cells. Such fragments maybe used, alone, in combination with other AAV serotype sequences or fragments, or in combination with elements from other AAV or non-AAV viral sequences. As used herein, artificial AAV serotypes include, without limitation, AAV with a non-naturally occurring capsid protein. Such an artificial capsid may be generated by any suitable technique using a selected AAV sequence (e.g., a fragment of a vp1 capsid protein) in combination with heterologous sequences which may be obtained from a different selected AAV serotype, non-contiguous portions of the same AAV serotype, from a non-AAV viral source, or from a non-viral source. An artificial AAV serotype may be, without limitation, a pseudotyped AAV, a chimeric AAV capsid, a recombinant AAV capsid, or a “humanized” AAV capsid.

[0254] Pseudotyped vectors, wherein the capsid of one AAV is replaced with a heterologous capsid protein, are useful in the disclosure. In some embodiments, the AAV is AAV2/5. In another embodiment, the AAV is AAV2/8. When pseudotyping an AAV vector, the sequences encoding each of the essential rep proteins may be supplied by different AAV sources (e.g., AAV1, AAV2, AAV3, AAV4, AAV5, AAV6, AAV7, AAV8). For example, the rep78/68 sequences may be from AAV2, whereas the rep52/40 sequences may be from AAV8.

[0255] In one embodiment, the vectors of the disclosure contain, at a minimum, sequences encoding a selected AAV serotype capsid, e.g., an AAV2 capsid or a fragment thereof. In another embodiment, the vectors of the disclosure contain, at a minimum, sequences encoding a selected AAV serotype rep protein, e.g., AAV2 rep protein, or a fragment thereof.

[0256] Optionally, such vectors may contain both AAV cap and rep proteins. In vectors in which both AAV rep and cap are provided, the AAV rep and AAV cap sequences can both be of one serotype origin, e.g., all AAV2 origin. In certain embodiments, the vectors may comprise rep sequences from an AAV serotype which differs from that which is providing the cap sequences. In some embodiments, the rep and cap sequences are expressed from separate sources (e.g., separate vectors, or a host cell and a vector). In some embodiments, these rep sequences are fused in frame to cap sequences of a different AAV serotype to form a chimeric AAV vector, such as AAV2/8 described in U.S. Pat. No. 7,282,199, which is incorporated by reference herein. Examples of AAV serotypes include AAV1, AAV2, AAV3, AAV4, AAV5, AAV6, AAV7, AAV8, AAV9, AAV10, AAV11, AAV 12, AAV-DJ, AAV-DJ8, AAV-DJ9, AAVrh8, AAVrh8R or AAVrh10. In some embodiments, the cap is derived from AAV2.

[0257] In some embodiments, any of the vectors disclosed herein includes a spacer, i.e., a DNA sequence interposed between the promoter and the rep gene ATG start site. In some embodiments, the spacer may be a random sequence of nucleotides, or alternatively, it may encode a gene product, such as a marker gene. In some embodiments, the spacer may contain genes which typically incorporate start/stop and polyA sites. In some embodiments, the spacer may be a non-coding DNA sequence from a prokaryote or eukaryote, a repetitive non-coding sequence, a coding sequence without transcriptional controls or a coding sequence with transcriptional controls. In some embodiments, the spacer is a phage ladder sequences or a yeast ladder sequence. In some embodiments, the spacer is of a size sufficient to reduce expression of the rep78 and rep68 gene products, leaving the rep52, rep40) and cap gene products expressed at normal levels. In some embodiments, the length of the spacer may therefore range from about 10 bp to about 10.0 kbp, preferably in the range of about 100 bp to about 8.0 kbp. In some embodiments, the spacer is less than 2 kbp in length.

[0258] In certain embodiments, the capsid is modified to improve therapy. The capsid may be modified using conventional molecular biology techniques. In certain embodiments, the capsid is modified for minimized immunogenicity, better stability and particle lifetime, efficient degradation, and/or accurate delivery of the nuclease system to the nucleus. In some embodiments, the modification or mutation is an amino acid deletion, insertion, substitution, or any combination thereof in a capsid protein. A modified polypeptide may comprise 1, 2, 3, 4, 5, up to 10, or more amino acid substitutions and/or deletions and/or insertions. A “deletion” may comprise the deletion of individual amino acids, deletion of small groups of amino acids such as 2, 3, 4 or 5 amino acids, or deletion of larger amino acid regions, such as the deletion of specific amino acid domains or other features. An “insertion” may comprise the insertion of individual amino acids, insertion of small groups of amino acids such as 2, 3, 4 or 5 amino acids, or insertion of larger amino acid regions, such as the insertion of specific amino acid domains or other features. A “substitution” comprises replacing a wild type amino acid with another (e.g., a non-wild type amino acid). In some embodiments, the another (e.g., non-wild type) or inserted amino acid is Ala (A), His (H), Lys (K), Phe (F), Met (M), Thr (T), Gin (Q), Asp (D), or Glu (E). In some embodiments, the another (e.g., non-wild type) or inserted amino acid is A. In some embodiments, the another (e.g., non-wild type) amino acid is Arg (R), Asn (N), Cys (C), Gly (G), lie (I), Leu (L), Pro (P), Ser (S), Trp (W), Tyr (Y), or Val (V). Conventional or naturally occurring amino acids are divided into the following basic groups based on common side-chain properties: (1) non-polar: Norleucine, Met, Ala, Val, Leu, He: (2) polar without charge: Cys, Ser, Thr, Asn, Gin: (3) acidic (negatively charged): Asp, Glu: (4) basic (positively charged): Lys, Arg: and (5) residues that influence chain orientation: Gly, Pro; and (6) aromatic: Trp, Tyr, Phe, His. Conventional amino acids include L or D stereochemistry. In some embodiments, the another (e.g., non-wild type) amino acid is a member of a different group (e.g., an aromatic amino acid is substituted for a non-polar amino acid). Substantial modifications in the biological properties of the polypeptide are accomplished by selecting substitutions that differ significantly in their effect on maintaining (a) the structure of the polypeptide backbone in the area of the substitution, for example, as a B-sheet or helical conformation, (b) the charge or hydrophobicity of the molecule at the target site, or (c) the bulk of the side chain. Naturally occurring residues are divided into groups based on common side-chain properties: (1) Non-polar: Norleucine, Met, Ala, Val, Leu, Ile;(2) Polar without charge: Cys, Ser, Thr, Asn, Gln;(3) Acidic (negatively charged): Asp, Glu;(4) Basic (positively charged): Lys. Arg(5) Residues that influence chain orientation: Gly, Pro: and(6) Aromatic: Trp, Tyr, Phe, His. In some embodiments, the another (e.g., non-wild type) amino acid is a member of a different group (e.g., a hydrophobic amino acid for a hydrophilic amino acid, a charged amino acid for a neutral amino acid, an acidic amino acid for a basic amino acid, etc.). In some embodiments, the another (e.g., non-wild type) amino acid is a member of the same group (e.g., another basic amino acid, another acidic amino acid, another neutral amino acid, another charged amino acid, another hydrophilic amino acid, another hydrophobic amino acid, another polar amino acid, another aromatic amino acid or another aliphatic amino acid). In some embodiments, the another (e.g., non-wild type) amino acid is an unconventional amino acid. Unconventional amino acids are non-naturally occurring amino acids. Examples of an unconventional amino acid include, but are not limited to, aminoadipic acid, beta-alanine, beta-aminopropionic acid, aminobutyric acid, piperidinic acid, aminocaprioic acid, aminoheptanoic acid, aminoisobutyric acid, aminopimelic acid, citrulline, diaminobutyric acid, desmosine, diaminopimelic acid, diaminopropionic acid, N-ethylglycine, N-ethylaspargine, hyroxylysine, allo-hydroxylysine, hydroxyproline, isodesmosine, allo-isoleucine, N-methylglycine, sarcosine, N-methylisoleucine, N-methylvaline, norvaline, norleucine, orithine, 4-hydroxyproline, Y-carboxyglutamate, ε-N,N,N-trimethyllysine, ε-N-acetyllysine, O-phosphoserine, N-acetylserine, N-formylmethionine, 3-methylhistidine, 5-hydroxy lysine, o-N-methylarginine, and other similar amino acids and amino acids (e.g., 4-hydroxyproline). In some embodiments, one or more amino acid substitutions are introduced into one or more of VP1, VP2 and VP3. In one aspect, a modified capsid protein comprises 1, 2, 3, 4, 5, 6, 7, 8, 9, 10, 11, 12, 13, 14, or 15 conservative or non-conservative substitutions relative to the wild-type polypeptide. In another aspect, the modified capsid polypeptide of the disclosure comprises modified sequences, wherein such modifications can include both conservative and non-conservative substitutions, deletions, and/or additions, and typically include peptides that share at least 60%, at least 65%, at least 70%, at least 75%, at least 80%, at least 85%, at least 87%, at least 89%, at least 90%, at least 91%, at least 92%, at least 93%, at least 94%, at least 95%, at least 96%, at least 97%, at least 98%, or at least 99% sequence identity to the corresponding wild-type capsid protein.

[0259] In some embodiments, the recombinant AAV vector, rep sequences, cap sequences, and helper functions required for producing the rAAV of the disclosure may be delivered to the packaging host cell using any appropriate genetic element (vector). In some embodiments, a single nucleic acid encoding all three capsid proteins (e.g., VP1, VP2 and VP3) is delivered into the packaging host cell in a single vector. In some embodiments, nucleic acids encoding the capsid proteins are delivered into the packaging host cell by two vectors: a first vector comprising a first nucleic acid encoding two capsid proteins (e.g., VP1 and VP2) and a second vector comprising a second nucleic acid encoding a single capsid protein (e.g., VP3). In some embodiments, three vectors, each comprising a nucleic acid encoding a different capsid protein, are delivered to the packaging host cell. The selected genetic element may be delivered by any suitable method, including those described herein. The methods used to construct any embodiment of this disclosure are known to those with skill in nucleic acid manipulation and include genetic engineering, recombinant engineering, and synthetic techniques. See, e.g., Sambrook et al., Molecular Cloning: A Laboratory Manual, Cold Spring Harbor Press, Cold Spring Harbor, N.Y. Similarly, methods of generating rAAV virions are well known and the selection of a suitable method is not a limitation on the present disclosure. See, e.g., K. Fisher et al., 1993 J. VIROL, 70:520-532 and U.S. Pat. No. 5,478,745, among others. These publications are incorporated by reference herein.

[0260] In some embodiments, recombinant AAVs may be produced using the triple transfection method (described in detail in U.S. Pat. No. 6,001,650). Typically, the recombinant AAVs are produced by transfecting a host cell with an recombinant AAV vector (comprising a transgene) to be packaged into AAV particles, an AAV helper function vector, and an accessory function vector. An AAV helper function vector encodes the “AAV helper function” sequences (e.g., rep and cap), which function in trans for productive AAV replication and encapsidation. Preferably, the AAV helper function vector supports efficient AAV vector production without generating any detectable wild-type AAV virions (e.g., AAV virions containing functional rep and cap genes). In some embodiments, vectors suitable for use with the present disclosure may be pHLP19, described in U.S. Pat. No. 6,001,650 and pRep6cap6 vector, described in U.S. Pat. No. 6,156,303, the entirety of both incorporated by reference herein. The accessory function vector encodes nucleotide sequences for non-AAV derived viral and/or cellular functions upon which AAV is dependent for replication (e.g., “accessory functions”). The accessory functions include those functions required for AAV replication, including, without limitation, those moieties involved in activation of AAV gene transcription, stage specific AAV mRNA splicing, AAV DNA replication, synthesis of cap expression products, and AAV capsid assembly. Viral-based accessory functions can be derived from any of the known helper viruses such as adenovirus, herpesvirus (other than herpes simplex virus type-1), and vaccinia virus.

[0261] Cells may also be transfected with a vector (e.g., helper vector) which provides helper functions to the AAV. The vector providing helper functions may provide adenovirus functions, including, e.g., E1a, E1b, E2a, E40RF6. The sequences of adenovirus gene providing these functions may be obtained from any known adenovirus serotype, such as serotypes 2, 3, 4, 7, 12 and 40, and further including any of the presently identified human types known in the art. Thus, in some embodiments, the methods involve transfecting the cell with a vector expressing one or more genes necessary for AAV replication, AAV gene transcription, and/or AAV packaging.

[0262] An rAAV vector of the disclosure is generated by introducing a nucleic acid sequence encoding an AAV capsid protein, or fragment thereof: a functional rep gene or a fragment thereof: a minigene composed of, at a minimum, AAV inverted terminal repeats (ITRs) and a transgene: and sufficient helper functions to permit packaging of the minigene into the AAV capsid, into a host cell. The components required for packaging an AAV minigene into an AAV capsid may be provided to the host cell in trans. Alternatively, any one or more of the required components (e.g., minigene, rep sequences, cap sequences, and/or helper functions) may be provided by a stable host cell which has been engineered to contain one or more of the required components using methods known to those of skill in the art.

[0263] In some embodiments, such a stable host cell will contain the required component(s) under the control of an inducible promoter. Alternatively, the required component(s) may be under the control of a constitutive promoter. Examples of suitable inducible and constitutive promoters are provided herein, in the discussion below of regulator elements suitable for use with the transgene, i.e., a nucleic acid comprising a nuclease system. In still another alternative, a selected stable host cell may contain selected components under the control of a constitutive promoter and other selected components under the control of one or more inducible promoters. For example, a stable host cell may be generated which is derived from 293 cells (which contain E1 helper functions under the control of a constitutive promoter), but which contains the rep and/or cap proteins under the control of inducible promoters. Still other stable host cells may be generated by one of skill in the art.

[0264] The minigene, rep sequences, cap sequences, and helper functions required for producing the rAAV of the disclosure may be delivered to the packaging host cell in the form of any genetic element which transfers the sequences. The selected genetic element may be delivered by any suitable method known in the art. See, e.g., Sambrook et al., Molecular Cloning: A Laboratory Manual, Cold Spring Harbor Press, Cold Spring Harbor, NY.

[0265] Unless otherwise specified, the AAV ITRs, and other selected AAV components described herein, may be readily selected from among any AAV serotype, including, without limitation, AAV1, AAV2, AAV3, AAV4, AAV5, AAV6, AAV7, AAV8, AAV9, AAV10, AAV10, AAV11, AAV 12, AAV-DJ, AAV-DJ8, AAV-DJ9, AAVrh8, AAVrh8R or AAVrh10 or other known and unknown AAV serotypes. These ITRs or other AAV components may be readily isolated using techniques available to those of skill in the art from an AAV serotype. Such AAV may be isolated or obtained from academic, commercial, or public sources (e.g., the American Type Culture Collection, Manassas, VA). Alternatively, the AAV sequences may be obtained through synthetic or other suitable means by reference to published sequences such as are available in the literature or in databases such as, e.g., GenBank, PubMed, or the like.

[0266] The minigene is composed of, at a minimum, a transgene comprising a nuclease system, as described above, and its regulatory sequences, and 5′ and 3′ AAV inverted terminal repeats (ITRs). In one desirable embodiment, the ITRs of AAV serotype 2 are used. However, ITRs from other suitable serotypes may be selected. The minigene is packaged into a capsid protein and delivered to a selected host cell.

[0267] In some embodiments, regulatory sequences are operably linked to the transgene comprising a nuclease system. The regulatory sequences may include conventional regulatory elements which are operably linked to the complement system gene, splice variant, or a fragment thereof in a manner which permits its transcription, translation and/or expression in a cell transfected with the vector or infected with the virus produced by the disclosure. As used herein, “operably linked” sequences include both expression control sequences that are contiguous with the gene of interest and expression control sequences that act in trans or at a distance to control the gene of interest. Expression control sequences include appropriate transcription initiation, termination, promoter and enhancer sequences: efficient RNA processing signals such as splicing and polyadenylation (poly A) signals: sequences that stabilize cytoplasmic mRNA: sequences that enhance translation efficiency (i.e., Kozak consensus sequence): sequences that enhance protein stability: and when desired, sequences that enhance secretion of the encoded product. Numerous expression control sequences, including promoters, are known in the art and may be utilized.

[0268] The regulatory sequences useful in the constructs of the present disclosure may also contain an intron, desirably located between the promoter/enhancer sequence and the gene. In some embodiments, the intron sequence is derived from SV-40, and is a 100 bp mini-intron splice donor/splice acceptor referred to as SD-SA. Another suitable sequence includes the woodchuck hepatitis virus post-transcriptional element. (See, e.g., L. Wang and I. Verma, 1999 PROC. NATL. ACAD. SCI., USA, 96:3906-3910). Poly A signals may be derived from many suitable species, including, without limitation SV-40, human and bovine.

[0269] Another regulatory component of the rAAV useful in the method of the disclosure is an internal ribosome entry site (IRES). An IRES sequence, or other suitable systems, may be used to produce more than one polypeptide from a single gene transcript (for example, to produce more than one complement system polypeptides). An IRES (or other suitable sequence) is used to produce a protein that contains more than one polypeptide chain or to express two different proteins from or within the same cell. An exemplary IRES is the poliovirus internal ribosome entry sequence, which supports transgene expression in photoreceptors, RPE and ganglion cells. Preferably, the IRES is located 3′ to the transgene in the rAAV vector.

[0270] In some embodiments, expression of the transgene comprising a nuclease system is driven by a separate promoter (e.g., a viral promoter). In certain embodiments, any promoters suitable for use in AAV vectors may be used with the vectors of the disclosure. The selection of the transgene promoter to be employed in the rAAV may be made from among a wide number of constitutive or inducible promoters that can express the selected transgene in the desired cell. Examples of suitable promoters are described in detail below.

[0271] Other regulatory sequences useful in the disclosure include enhancer sequences. Enhancer sequences useful in the disclosure include the 1RBP enhancer, immediate early cytomegalovirus enhancer, one derived from an immunoglobulin gene or SV40 enhancer, the cis-acting element identified in the mouse proximal promoter, etc.

[0272] Selection of these and other common vector and regulatory elements are well-known and many such sequences are available. See, e.g., Sambrook et al., and references cited therein at, for example, pages 3.18-3.26 and 16, 17-16.27 and Ausubel et al., Current Protocols in Molecular Biology, John Wiley & Sons, New York, 1989).

[0273] The rAAV vector may also contain additional sequences, for example from an adenovirus, which assist in effecting a desired function for the vector. Such sequences include, for example, those which assist in packaging the rAAV vector in adenovirus-associated virus particles.

[0274] The rAAV vector may also contain a reporter sequence for co-expression, such as but not limited to lacZ, GFP, CFP, YFP, RFP, mCherry, tdTomato, etc. In some embodiments, the rAAV vector may comprise a selectable marker. In some embodiments, the selectable marker is an antibiotic-resistance gene. In some embodiments, the antibiotic-resistance gene is an ampicillin-resistance gene. In some embodiments, the ampicillin-resistance gene is beta-lactamase.

[0275] In some embodiments, the rAAV particle is an ssAAV. In some embodiments, the rAAV particle is a self-complementary AAV (sc-AAV) (See, US 2012/0141422 which is incorporated herein by reference). Self-complementary vectors package an inverted repeat genome that can fold into dsDNA without the requirement for DNA synthesis or base-pairing between multiple vector genomes. Because scAAV have no need to convert the single-stranded DNA (ssDNA) genome into double-stranded DNA (dsDNA) prior to expression, they are more efficient vectors. However, the trade-off for this efficiency is the loss of half the coding capacity of the vector, ScAAV are useful for small protein-coding genes (up to −55 kd) and any currently available RNA-based therapy.

[0276] The single-stranded nature of the AAV genome may impact the expression of rAAV vectors more than any other biological feature. Rather than rely on potentially variable cellular mechanisms to provide a complementary-strand for rAAV vectors, it has now been found that this problem may be circumvented by packaging both strands as a single DNA molecule. In the studies described herein, an increased efficiency of transduction from duplexed vectors over conventional rAAV was observed in He La cells (5-140 fold). More importantly, unlike conventional single-stranded AAV vectors, inhibitors of DNA replication did not affect transduction from the duplexed vectors of the invention. In addition, the inventive duplexed parvovirus vectors displayed a more rapid onset and a higher level of transgene expression than did rAAV vectors in mouse hepatocytes in vivo. All of these biological attributes support the generation and characterization of a new class of parvovirus vectors (delivering duplex DNA) that significantly contribute to the ongoing development of parvovirus-based gene delivery systems.

[0277] Overall, a novel type of parvovirus vector that carries a duplexed genome, which results in co-packaging strands of plus and minus polarity tethered together in a single molecule, has been constructed and characterized by the investigations described herein. Accordingly, the present invention provides a parvovirus particle comprising a parvovirus capsid (e.g., an AAV capsid) and a vector genome encoding a heterologous nucleotide sequence, where the vector genome is self-complementary, i.e., the vector genome is a dimeric inverted repeat. The vector genome is preferably approximately the size of the wild-type parvovirus genome (e.g., the AAV genome) corresponding to the parvovirus capsid into which it will be packaged and comprises an appropriate packaging signal. The present invention further provides the vector genome described above and templates that encode the same.

[0278] rAAV vectors useful in the methods of the disclosure are further described in PCT publication No. WO2015168666 and PCT publication no. WO2014011210, the contents of which are incorporated by reference herein.

### VI. Production of rAAV Vectors

[0279] Numerous methods are known in the art for production of rAAV vectors, including transfection, stable cell line production, and infectious hybrid virus production systems which include adenovirus-AAV hybrids, herpesvirus-AAV hybrids (Conway, J E et al., (1997). Virology 71(11):8780-8789) and baculovirus-AAV hybrids. rAAV production cultures for the production of rAAV virus particles all require: 1) suitable host cells, including, for example, human-derived cell lines such as HeLa, A549, or 293 cells, or insect-derived cell lines such as SF-9, in the case of baculovirus production systems: 2) suitable helper virus function, provided by wild-type or mutant adenovirus (such as temperature sensitive adenovirus), herpes virus, baculovirus, or a plasmid construct providing helper functions: 3) AAV rep and cap genes and gene products: 4) a transgene (such as a transgene comprising a nuclease system) flanked by at least one AAV ITR sequence: and 5) suitable media and media components to support rAAV production. Suitable media known in the art may be used for the production of rAAV vectors. These media include, without limitation, media produced by Hyclone Laboratories and JRH including Modified Eagle Medium (MEM), Dulbecco's Modified Eagle Medium (DMEM), custom formulations such as those described in U.S. Pat. No. 6,566,118, and Sf-900 II SFM media as described in U.S. Pat. No. 6,723,551, each of which is incorporated herein by reference in its entirety, particularly with respect to custom media formulations for use in production of recombinant AAV vectors.

[0280] The rAAV particles can be produced using methods known in the art. See, e.g., U.S. Pat. Nos. 6,566,118; 6,989,264: and 6,995,006. In practicing the disclosure, host cells for producing rAAV particles include mammalian cells, insect cells, plant cells, microorganisms and yeast. Host cells can also be packaging cells in which the AAV rep and cap genes are stably maintained in the host cell or producer cells in which the AAV vector genome is stably maintained. Exemplary packaging and producer cells are derived from 293, A549 or HeLa cells. AAV vectors are purified and formulated using standard techniques known in the art.

[0281] Recombinant AAV particles are generated by transfecting producer cells with a plasmid (cis-plasmid) containing a rAAV genome comprising a transgene flanked by the 145 nucleotide-long AAV ITRs and a separate construct expressing the AAV rep and CAP genes in trans. In addition, adenovirus helper factors such as E1A, E1B, E2A, E40RF6 and VA RNAs, etc. may be provided by either adenovirus infection or by transfecting a third plasmid providing adenovirus helper genes into the producer cells. Producer cells may be HEK293 cells. Packaging cell lines suitable for producing adeno-associated viral vectors may be readily accomplished given readily available techniques (see e.g., U.S. Pat. No. 5,872,005). The helper factors provided will vary depending on the producer cells used and whether the producer cells already carry some of these helper factors.

[0282] In some embodiments, rAAV particles may be produced by a triple transfection method, such as the exemplary triple transfection method provided infra. Briefly, a plasmid containing a rep gene and a capsid gene, along with a helper adenoviral plasmid, may be transfected (e.g., using the calcium phosphate method) into a cell line (e.g., HEK-293 cells), and virus may be collected and optionally purified.

[0283] In some embodiments, rAAV particles may be produced by a producer cell line method, such as the exemplary producer cell line method provided infra (see also (referenced in Martin et al., (2013) HUMAN GENE THERAPY METHODS 24:253-269). Briefly, a cell line (e.g., a HeLa cell line) may be stably transfected with a plasmid containing a rep gene, a capsid gene, and a promoter-transgene sequence. Cell lines may be screened to select a lead clone for rAAV production, which may then be expanded to a production bioreactor and infected with an adenovirus (e.g., a wild-type adenovirus) as helper to initiate rAAV production. Virus may subsequently be harvested, adenovirus may be inactivated (e.g., by heat) and/or removed, and the rAAV particles may be purified.

[0284] In some aspects, a method is provided for producing any rAAV particle as disclosed herein comprising (a) culturing a host cell under a condition that rAAV particles are produced, wherein the host cell comprises (i) one or more AAV package genes, wherein each said AAV packaging gene encodes an AAV replication and/or encapsidation protein: (ii) a rAAV pro-vector comprising a nucleic acid encoding a therapeutic polypeptide and/or nucleic acid as described herein flanked by at least one AAV ITR, and (iii) an AAV helper function: and (b) recovering the rAAV particles produced by the host cell. In some embodiments, said at least one AAV ITR is selected from the group consisting of AAV ITRs are AAV1, AAV2, AAV3, AAV4, AAV5, AAV6, AAV7, AAV8, AAVrh8, AAVrh8R, AAV9, AAV10, AAVrh10, AAV11, AAV 12, AAV2R471A, AAV DJ, a goat AAV, bovine AAV, or mouse AAV or the like. In some embodiments, the encapsidation protein is an AAV2 encapsidation protein.

[0285] Suitable rAAV production culture media of the present disclosure may be supplemented with serum or serum-derived recombinant proteins at a level of 0.5-20 (v/v or w/v). Alternatively, as is known in the art, rAAV vectors may be produced in serum-free conditions which may also be referred to as media with no animal-derived products. One of ordinary skill in the art may appreciate that commercial or custom media designed to support production of rAAV vectors may also be supplemented with one or more cell culture components know in the art, including without limitation glucose, vitamins, amino acids, and or growth factors, in order to increase the titer of rAAV in production cultures.

[0286] rAAV production cultures can be grown under a variety of conditions (over a wide temperature range, for varying lengths of time, and the like) suitable to the particular host cell being utilized. As is known in the art, rAAV production cultures include attachment-dependent cultures which can be cultured in suitable attachment-dependent vessels such as, for example, roller bottles, hollow fiber filters, microcarriers, and packed-bed or fluidized-bed bioreactors. rAAV vector production cultures may also include suspension-adapted host cells such as HeLa, 293, and SF-9 cells which can be cultured in a variety of ways including, for example, spinner flasks, stirred tank bioreactors, and disposable systems such as the Wave bag system.

[0287] rAAV vector particles of the disclosure may be harvested from rAAV production cultures by lysis of the host cells of the production culture or by harvest of the spent media from the production culture, provided the cells are cultured under conditions known in the art to cause release of rAAV particles into the media from intact cells, as described more fully in U.S. Pat. No. 6,566,118). Suitable methods of lysing cells are also known in the art and include for example multiple freeze/thaw cycles, sonication, microfluidization, and treatment with chemicals, such as detergents and/or proteases.

[0288] In a further embodiment, the rAAV particles are purified. The term “purified” as used herein includes a preparation of rAAV particles devoid of at least some of the other components that may also be present where the rAAV particles naturally occur or are initially prepared from. Thus, for example, isolated rAAV particles may be prepared using a purification technique to enrich it from a source mixture, such as a culture lysate or production culture supernatant. Enrichment can be measured in a variety of ways, such as, for example, by the proportion of DNase-resistant particles (DRPs) or genome copies (gc) present in a solution, or by infectivity, or it can be measured in relation to a second, potentially interfering substance present in the source mixture, such as contaminants, including production culture contaminants or in-process contaminants, including helper virus, media components, and the like.

[0289] In some embodiments, the rAAV production culture harvest is clarified to remove host cell debris. In some embodiments, the production culture harvest is clarified by filtration through a series of depth filters including, for example, a grade DOHC Millipore Millistak+HC Pod Filter, a grade AIHC Millipore Millistak+HC Pod Filter, and a 0.2 uvn Filter Opticap XL 10 Millipore Express SHC Hydrophilic Membrane filter. Clarification can also be achieved by a variety of other standard techniques known in the art, such as, centrifugation or filtration through any cellulose acetate filter of 0.2 uvn or greater pore size known in the art.

[0290] In some embodiments, the rAAV production culture harvest is further treated with Benzonase R to digest any high molecular weight DNA present in the production culture. In some embodiments, the Benzonase R digestion is performed under standard conditions known in the art including, for example, a final concentration of 1-2.5 units/ml of Benzonase R at a temperature ranging from ambient to 37° ° C. for a period of 30 minutes to several hours.

[0291] rAAV particles may be isolated or purified using one or more of the following purification steps: equilibrium centrifugation: flow-through anionic exchange filtration: tangential flow filtration (TFF) for concentrating the rAAV particles: rAAV capture by apatite chromatography: heat inactivation of helper virus: rAAV capture by hydrophobic interaction chromatography: buffer exchange by size exclusion chromatography (SEC): nanofiltration: and rAAV capture by anionic exchange chromatography, cationic exchange chromatography, or affinity chromatography. These steps may be used alone, in various combinations, or in different orders. In some embodiments, the method comprises all the steps in the order as described below. Methods to purify rAAV particles are found, for example, in Xiao et al., (1998) Journal of Virology 72:2224-2232: U.S. Pat. Nos. 6,989,264 and 8,137,948; and WO 2010/148143.

### VII. Pharmaceutical Compositions

[0292] Also provided herein are pharmaceutical compositions comprising a nuclease system described herein and a pharmaceutically acceptable carrier. The pharmaceutical compositions may be suitable for any mode of administration described herein.

[0293] In some embodiments, the pharmaceutical compositions comprising a nucleic acid described herein and a pharmaceutically acceptable carrier is suitable for administration to a human subject. Such carriers are well known in the art (see, e.g., Remington's Pharmaceutical Sciences, 15th Edition, pp. 1035-1038 and 1570-1580). Such pharmaceutically acceptable carriers can be sterile liquids, such as water and oil, including those of petroleum, animal, vegetable or synthetic origin, such as peanut oil, soybean oil, mineral oil, and the like. Saline solutions and aqueous dextrose, polyethylene glycol (PEG) and glycerol solutions can also be employed as liquid carriers, particularly for injectable solutions. The pharmaceutical composition may further comprise additional ingredients, for example preservatives, buffers, tonicity agents, antioxidants and stabilizers, nonionic wetting or clarifying agents, viscosity-increasing agents, and the like. The pharmaceutical compositions described herein can be packaged in single unit dosages or in multidosage forms. The compositions are generally formulated as sterile and substantially isotonic solution.

[0294] In one embodiment, the nucleic acid comprising the nuclease system and compact bidirectional promoter for use in the target cells as detailed above is formulated into a pharmaceutical composition intended for oral, inhalation, intranasal, intratracheal, intravenous, intramuscular, subcutaneous, intradermal, and other parental routes of administration. Such formulation involves the use of a pharmaceutically and/or physiologically acceptable vehicle or carrier, such as buffered saline or other buffers, e.g., HEPES, to maintain pH at appropriate physiological levels, and, optionally, other medicinal agents, pharmaceutical agents, stabilizing agents, buffers, carriers, adjuvants, diluents, etc. For injection, the carrier will typically be a liquid. Exemplary physiologically acceptable carriers include sterile, pyrogen-free water and sterile, pyrogen-free, phosphate buffered saline. A variety of such known carriers are provided in U.S. Pat. Publication No. 7,629,322, incorporated herein by reference. In one embodiment, the carrier is an isotonic sodium chloride solution. In another embodiment, the carrier is balanced salt solution. In one embodiment, the carrier includes tween. If the virus is to be stored long-term, it may be frozen in the presence of glycerol or Tween20. In another embodiment, the pharmaceutically acceptable carrier comprises a surfactant, such as perfluorooctane (Perfluoron liquid). Routes of administration may be combined, if desired.

[0295] The composition may be delivered in a volume of from about 0.1 μL to about 1 mL, including all numbers within the range, depending on the size of the area to be treated, the viral titer used, the route of administration, and the desired effect of the method. In one embodiment, the volume is about 50 μL. In another embodiment, the volume is about 70 μL. In a preferred embodiment, the volume is about 100 μL. In another embodiment, the volume is about 125 μL. In another embodiment, the volume is about 150 μL. In another embodiment, the volume is about 175 μL. In yet another embodiment, the volume is about 200 μL. In another embodiment, the volume is about 250 μL. In another embodiment, the volume is about 300 μL. In another embodiment, the volume is about 450 μL. In another embodiment, the volume is about 500 μL. In another embodiment, the volume is about 600 μL. In another embodiment, the volume is about 750 μL. In another embodiment, the volume is about 850 μL. In another embodiment, the volume is about 1000 μL. An effective concentration of a recombinant adeno-associated virus carrying a nucleic acid sequence encoding the desired transgene under the control of the cell-specific promoter sequence desirably ranges from about 10⁷ and 10¹³ vector genomes per milliliter (vg/mL) (also called genome copies/mL (GC/mL)). The rAAV infectious units are measured as described in S. K. McLaughlin et al., 1988 J. Virol., 62: 1963, which is incorporated herein by reference.

[0296] Preferably, the concentration in the target tissue is from about 1.5×10⁹ vg/mL to about 1.5×10¹² vg/mL, and more preferably from about 1.5×10⁹ vg/mL to about 1.5×10¹¹ vg/mL. In certain preferred embodiments, the effective concentration is about 2.5×10¹⁰ vg to about 1.4×10¹¹. In one embodiment, the effective concentration is about 1.4×10⁸ vg/mL. In one embodiment, the effective concentration is about 3.5×10¹⁰ vg/mL. In another embodiment, the effective concentration is about 5.6×10¹¹ vg/mL. In another embodiment, the effective concentration is about 5.3×10¹² vg/mL. In yet another embodiment, the effective concentration is about 1.5×10¹² vg/mL. In another embodiment, the effective concentration is about 1.5×10¹³ vg/mL. In one embodiment, the effective dosage (total genome copies delivered) is from about 10⁷ to 10¹³ vector genomes. It is desirable that the lowest effective concentration of virus be utilized in order to reduce the risk of undesirable effects, such as toxicity. Still other dosages and administration volumes in these ranges may be selected by the attending physician, taking into account the physical state of the subject, preferably human, being treated, the age of the subject, the particular disorder and the degree to which the disorder, if progressive, has developed.

[0297] Pharmaceutical compositions useful in the methods of the disclosure are further described in PCT publication No. WO2015168666 and PCT publication no. WO201401 1210, the contents of which are incorporated by reference herein.

### VIII. Kits

[0298] In some embodiments, any of the vectors disclosed herein is assembled into a pharmaceutical or diagnostic or research kit to facilitate their use in therapeutic, diagnostic or research applications. A kit may include one or more containers housing any of the vectors disclosed herein and instructions for use.

[0299] The kit may be designed to facilitate use of the methods described herein by researchers and can take many forms. Each of the compositions of the kit, where applicable, may be provided in liquid form (e.g., in solution), or in solid form, (e.g., a dry powder). In certain cases, some of the compositions may be constitutable or otherwise processable (e.g., to an active form), for example, by the addition of a suitable solvent or other species (for example, water or a cell culture medium), which may or may not be provided with the kit. As used herein, “instructions” can define a component of instruction and/or promotion, and typically involve written instructions on or associated with packaging of the disclosure. Instructions also can include any oral or electronic instructions provided in any manner such that a user will clearly recognize that the instructions are to be associated with the kit, for example, audiovisual (e.g., videotape, DVD, etc.), Internet, and/or web-based communications, etc. The written instructions may be in a form prescribed by a governmental agency regulating the manufacture, use or sale of pharmaceuticals or biological products, which instructions can also reflects approval by the agency of manufacture, use or sale for animal administration.

[0300] Throughout the description, where compositions are described as having, including, or comprising specific components, or where processes and methods are described as having, including, or comprising specific steps, it is contemplated that, additionally, there are compositions of the present invention that consist essentially of, or consist of, the recited components, and that there are processes and methods according to the present invention that consist essentially of, or consist of, the recited processing steps.

[0301] In the application, where an element or component is said to be included in and/or selected from a list of recited elements or components, it should be understood that the element or component can be any one of the recited elements or components, or the element or component can be selected from a group consisting of two or more of the recited elements or components.

[0302] Further, it should be understood that elements and/or features of a composition or a method described herein can be combined in a variety of ways without departing from the spirit and scope of the present invention, whether explicit or implicit herein. For example, where reference is made to a particular compound, that compound can be used in various embodiments of compositions of the present invention and/or in methods of the present invention, unless otherwise understood from the context. In other words, within this application, embodiments have been described and depicted in a way that enables a clear and concise application to be written and drawn, but it is intended and will be appreciated that embodiments may be variously combined or separated without parting from the present teachings and invention(s). For example, it will be appreciated that all features described and depicted herein can be applicable to all aspects of the invention(s) described and depicted herein.

[0303] It should be understood that the expression “at least one of” includes individually each of the recited objects after the expression and the various combinations of two or more of the recited objects unless otherwise understood from the context and use. The expression “and/or” in connection with three or more recited objects should be understood to have the same meaning unless otherwise understood from the context.

[0304] The use of the term “include,” “includes,” “including,” “have,” “has,” “having,” “contain,” “contains,” or “containing,” including grammatical equivalents thereof, should be understood generally as open-ended and non-limiting, for example, not excluding additional unrecited elements or steps, unless otherwise specifically stated or understood from the context.

[0305] Where the use of the term “about” is before a quantitative value, the present invention also includes the specific quantitative value itself, unless specifically stated otherwise. As used herein, the term “about” refers to a +10% variation from the nominal value unless otherwise indicated or inferred.

[0306] It should be understood that the order of steps or order for performing certain actions is immaterial so long as the present invention remain operable. Moreover, two or more steps or actions may be conducted simultaneously.

[0307] The use of any and all examples, or exemplary language herein, for example, “such as” or “including,” is intended merely to illustrate better the present invention and does not pose a limitation on the scope of the invention unless claimed. No language in the specification should be construed as indicating any non-claimed element as essential to the practice of the present invention.

### EXAMPLES

[0308] The following Examples are merely illustrative and are not intended to limit the scope or content of the invention in any way.

### Example 1. Therapeutic Development of Compact Promoters for Expression of Nuclease

### Systems

[0309] This Example describes identification and characterization of a promoter that is small, strong, ubiquitous, and endogenous, for adeno-associated virus (AAV) packaging of nuclease systems.

[0310] Bioinformatics analysis revealed the H1 bidirectional promoter appears to be ubiquitously expressed, which is logical given the biology and tissue expression data for both H1-driven genes (H1RNA and PARP-2). Endogenously, the H1 bidirectional promoter expresses an essential RNA gene (H1RNA) involved with tRNA processing and a ubiquitously expressed protein gene (PARP2). While a lack of transgene silencing using the H1 bidirectional promoter is not guaranteed, this result would be consistent with other endogenous mammalian promoters.

[0311] Evolutionary conservation throughout eutherian mammals further supports the presence of a functional genetic regulatory element between the H1RNA and PARP2 genes, and enabled identification of numerous small and compact promoters through gene synteny (FIG. 20A). The orthologous H1 bidirectional promoters tested have all shown promoter activity in human cell lines, as well as cell lines of multiple different species.

[0312] To test the relative strength of the numerous promoter orthologs, a luciferase reporter construct that enables quantitation of RNA polymerase II (pol II) promoter activity was designed. In order to reduce any confounding noise and spurious reporter gene transcription, the plasmid constructs contained 5′ and 3′ beta-globin insulators that flank the expression cassette: the H1 promoter, firefly luciferase, and bGH poly(A) signal were found inside the insulators. It was observed that the pol II promoter activity varied significantly between orthologs, and consequently, the analysis was expanded to over 70 promoters, each tested in multiple human cell lines (FIG. 20B). The constructs were fully-synthesized, sequence verified, and amplified by endotoxin-free maxipreps for transfection studies.

[0313] In order to benchmark the pol II expression levels of these H1 promoters against known promoters, two commonly used promoters were included, the HSK thymidine kinase (TK) promoter and the phosphoglycerate kinase 1 (PGK1) promoter. The TK promoter is 753 basepairs (bp) and known to be a promoter that drives lower expression levels of regulated genes, while PGK1 is 515 bp and known to drive higher expression of regulated genes. The data in FIG. 20B shows the ranked order of promoter activity in Hela cells with TK (orange, 8th bar from the left) and PGK1 (blue, 1st bar from the right) indicated. FIG. 20B demonstrates a wide range of expression of the H1 promoter orthologs.

[0314] Additionally, the promoter lengths were plotted overlaying the same data with red bars and corresponding to the right Y axis (a non-standard Y-axis range of 150 bp to 250 bp was used to depict the sizes for each promoter clearly). In addition to a range of activity, the promoter sizes were small (between about 150-240 bp) and demonstrated no correlation between size and promoter activity. Indeed, multiple promoters were found in the 150-180 bp size range with significant transcriptional activity. Nine of the promoters were 183 bp or smaller.

### Example 2. Mouse H1 Promoter Deletion Analysis

[0315] To determine which regions of the mouse H1 promoter were need for activity, a series of mouse H1 promoter constructs were made and tested. A schematic representation of the mouse H1 promoter deletion constructs is shown in FIG. 21, with the wild-type mouse promoter (p059, SEQ ID NO: 93) shown at the top and seven successive 10 bp deletion constructs shown below: An alignment of the various deletion constructs is provided in FIG. 22. These promoters and variants were used to drive reporters and quantitate expression.

[0316] To test the relative activity of promoters, luciferase reporter constructs were designed that enable quantitation of the Pol II promoter activity of the promoters. To reduce confounding noise and spurious reporter gene transcription, the plasmid constructs contain 5′ and 3′ beta-globin insulators that flank the expression cassette: the promoter sequence connected to a control guide RNA on one side and firefly luciferase on the other side, and bGH poly(A) signal are found inside the insulators.

[0317] Generally, cell lines were subcultured and seeded into 96-well plates 24 hours prior to transfection. On the day of transfection, the firefly luciferase construct was co-transfected with the NanoLuc control construct using Lipofectamine 3000. At 24 hours post-transfection, plates were sequentially assayed for firefly luciferase and NanoLuc using the Nano-Glo Dual-Luciferase Reporter Assay System (Promega) by imaging for total luminescence on a plate reader (Biotek). For data analysis and plotting, the firefly luminescence signal was normalized to the control Nanoluc signal in each well. Technical replicates within samples were averaged together to produce a single biological replicate value, and the mean values between biological replicates were then plotted with error bars indicating the SEM. Results are shown in FIG. 23 (normalized firefly to nanoluc luciferase signal for each construct).

[0318] As shown in FIG. 23, each deletion construct retained a portion of the full-length wild-type H1 promoter activity. It is contemplated that fragments of H1 promoters (e.g., the H1 promoters described herein) that retain activity can be used to express a nuclease system, for example, that includes both a nuclease and a gRNA.

### Example 3. Mouse H1 Promoter Mutation Analysis

[0319] Seventeen (17) mutation constructs were designed by walking across the promoter in 10 bp increments and replacing the sequence with its reverse complement. A schematic representation of the constructs is shown in FIG. 24 and an alignment of the sequences shown in FIG. 25. Constructs were made and tested as described in Example 2. Results are shown in FIG. 26.

[0320] As shown in FIG. 26, each mutation construct retained a portion of the full-length wild-type H1 promoter activity. It is contemplated that variants of H1 promoters (e.g., the H1 promoters described herein) that retain activity can be used to express a nuclease system, for example, that includes both a nuclease and a gRNA.

### Example 4. Mouse H1 Promoter with Introns

[0321] Twelve (12) different constructs were designed to incorporate introns into the mouse H1 promoter region. Different intron sequences and different insertion locations were used as shown in FIG. 27. Constructs were made and tested as described in Example 2. Results are shown in FIG. 28.

[0322] As shown in FIG. 28, each intron construct retained at least a portion of the full-length wild-type H1 promoter activity. It is contemplated that variants (e.g., intron-containing variants) of H1 promoters (e.g., the H1 promoters described herein) that retain activity can be used to express a nuclease system, for example, that includes both a nuclease and a gRNA.

### Example 5. Human and Mouse H15′UTR Constructs

[0323] FIG. 29 provides a schematic showing the design of human H1 promoter and variant constructs. As shown in FIG. 29, a construct carrying a human H1 promoter alone, a human H1 promoter with a 9 bp Kozak sequence (GCCGCCACC (SEQ ID NO: 256)), a human H1 promoter with a beta-globin 5′UTR, and a human H1 promoter with a TATA box mutation (TATAA->TCGAA) were designed. An alignment of the sequences is shown in FIG. 30.

[0324] Constructs were made and tested as described in Example 2. Results are shown in FIG. 31.

[0325] As shown in FIG. 31 addition of 5′UTR sequences increased expression from an H1 promoter. Accordingly, such 5′UTR sequences can be used to increase expression from a promoter as described herein (e.g., an H1 promoter).

[0326] H1 5′UTR constructs also were made and tested using the mouse H1 promoter, as shown in FIGS. 32 and 33. Results are shown in FIG. 34.

[0327] As shown in FIG. 34, most of the tested 5′UTR sequences increased expression from a mouse H1 promoter. Accordingly, such 5′UTR sequences can be used to increase expression from a promoter as described herein (e.g., a mouse H1 promoter).

### Example 6. Expression of H1, Gar-1 and Other Bidirectional Promoters

[0328] Additional constructs were designed as described above, but using the following promoters: human H1 (p144: SEQ ID NO: 87), mouse H1 (p148: SEQ ID NO: 93), human 7sk-1 (p199: SEQ ID NO: 242), mouse 7sk-1 (p203: SEQ ID NO: 204), human ALOXE3 (p204: SEQ ID NO: 246), human CGB1 (p206: SEQ ID NO: 247), human CGB2 (p207: SEQ ID NO: 248), human GAR1-1 (p216: SEQ ID NO: 107), human Med16-1 (p222: SEQ ID 0 NO: 249), human Med16-2 (p223: SEQ ID NO: 250), human SRP (p242: SEQ ID NO: 233).

[0329] Constructs were made and tested as described above. Results are shown in FIG. 35.

[0330] As shown in FIG. 35, most of the tested bidirectional promoters showed increased expression as compared to an H1 promoter. Gar-1 showed the highest level of expression. Accordingly, such compact bidirectional promoters can be used to express a nuclease system using a vector, such as an AAV vector, that has limited space. 15

### Example 7. Assessment of Promoter Activity in Exemplary Cell Lines

[0331] This Example describes the characterization of a library of H1 promoters for their capacity to drive gene expression using luciferase reporters (Firefly luciferase and NANOLUCR) in three lung cell lines (A549, Calu-3, and CFBE410-). Normalized luciferase expression was quantified for 71 H1 promoters and benchmarked against a control thymidine kinase (TK) promoter (FIGS. 37, 38, and 39).

[0332] Promoter expression activity was assessed using a luciferase reporter assay. Characterization of the luciferase assay was performed by co-transfecting cells with a plasmid encoding Firefly luciferase and with a plasmid encoding NANOLUCR reporters. The luciferase reporters were under transcriptional control of standard promoters (EF1a, PGK, and TK). A standard curve of the normalized luciferase signal (Firefly signal/NANOLUCR signal) was generated using the following transfection ratios, 90 ng Firefly: 10 ng NANOLUCR, 99 ng Firefly: 1 ng NANOLUCR, and 100 ng Firefly:0. 1 ng NANOLUCR (FIG. 36). Establishing such a ratiometric luciferase reporter assay allowed the determination of promoter expression activity without cross-signal interference.

[0333] A library of 71 H1 promoters was then evaluated for expression activity in three lung cell types (A549, Calu-3, and CFBE410-) (FIGS. 37, 38, and 39) and two non-lung cell types (HEK293 and HeLa) used as control samples. Rank-order activity of the compact promoters in the library is shown in FIGS. 37, 38, and 39, along with activity of the standard TK promoter is shown (“TK”). Distributions of expression activity across the three lung cell types is shown in FIG. 40A. Of the 71 compact H1 promoters tested, 59 promoters in Calu-3 cells, 55 promoters in CFBE410-cells, and 11 in A549 cells exceeded TK controlled expression of luciferase reporter plasmids. The strongest promoters exceeded TK controlled expression activity by 2.5-8-fold and were only modestly weaker than the two strong standard promoters PGK and EF1a (FIG. 40B). The data suggests that most of the H1 promoters are active in lung cell lines. Furthermore, the promoters in this library do not contain viral or synthetic elements that can have negative consequences stemming from long-range enhancer activity. The data also showed that promoter activity was well-correlated among lung cell lines and across non-lung-cell types (FIG. 41). Hierarchical analysis (complete linkage clustering) was conducted to produce a heatmap as shown in FIG. 42. Through hierarchical analysis, a pattern suggesting that strong promoters in one cell type are likely to be strong promoters in other cell types emerged, enabling the clustering of promoters based on expression activity into six separate clusters (FIG. 42). Cluster 1 included promoters p071, p066, p101, p095, p109, p110, p094, p127, p060, p116, p099, p131, p077, p092, p073, p100, p112, p081, and p098. Cluster 2 included promoters p130, p063, p079, p083, p103, p062, p119, p091, p070, p072, p097, p065, p106, p078, p084, p087, p107, p088, and p102. Cluster 3 included promoter p104. Cluster 4 included promoters p123, p111, and p128. Cluster 5 included promoters p085, p064, and p082. Cluster 6 included promoters p115, p129, p118, p120, p126, p122, p108, p114, p090, p096, p105, p076, p117, p125, p061, p068, p086, p059, p058, p067, p069, p089, p074, p113, p093, and p124. Clusters 3-6 showed higher expression levels above the control TK p322 promoter.

[0334] Following clustering based on expression activity, the top five and bottom five promoters in A549 cells were identified, along with their respective ranking in four other cell types, as shown in TABLE 35.

TABLE 35
The top five and bottom five promoters in A549,
CFBE41o-, Calu-3, HeLa, and HEK293 cells.

| | | | | |
|---|---|---|---|---|
| A549 | CFBE41o- | Calu-3 | HeLa | HEK293 |

Top five promoters

| | | | | | |
|---|---|---|---|---|---|
| p104 | 1 | 1 | 1 | 3 | 5 |
| p123 | 2 | 2 | 5 | 2 | 10 |
| p111 | 3 | 10 | 6 | 7 | 20 |
| p128 | 4 | 24 | 8 | 4 | 11 |
| p118 | 5 | 6 | 31 | 10 | 23 |

Bottom five promoters

| | | | | | |
|---|---|---|---|---|---|
| p087 | 67 | 15 | 62 | 41 | 25 |
| p094 | 68 | 66 | 69 | 69 | 60 |
| p088 | 69 | 67 | 60 | 45 | 54 |
| p127 | 70 | 70 | 70 | 70 | 70 |
| p095 | 71 | 71 | 71 | 71 | 71 |

[0335] Wild type AAV genomes are ˜4.7 kb in length and recombinant AAV can package up to ˜5.2 kb. Given that AAV packaging efficiency may improve with smaller cassettes, a subset of promoters <200 bp was further analyzed and ranked as shown in TABLE 36.

TABLE 36
Ranked expression for ultra-compact (≤200 bp) promoters.
Ranked Expression

| | CFBE41o- | A549 | Calu-3 | HeLa | HEK293 | Size (bp) |
|---|---|---|---|---|---|---|
| p074 | 43 | 13 | 16 | 16 | 13 | 197 |
| p093 | 18 | 19 | 19 | 17 | 1 | 180 |
| p117 | 5 | 35 | 12 | 13 | 46 | 179 |
| p069 | 48 | 37 | 26 | 19 | 4 | 167 |
| p059 | 17 | 40 | 30 | 33 | 42 | 176 |

[0336] The compact promoters described herein are advantageous for their ability to drive expression of a protein and an RNA, such a nuclease and a guide RNA, while allowing packaging in an AAV vector, circumventing long-standing challenges with AAV vector use for gene editing applications. Many of the compact promoters described herein show expression levels at least as strong as a TK promoter (see, e.g., FIG. 40B).

### Example 8. Generation of Ancestral H1 Promoter Sequences

[0337] This example describes the generation of synthetic H1 promoters (SEQ ID NOs: 936-1303) by reconstructing ancestral sequences from the H1 promoters herein described (e.g., SEQ ID NOs: 25-106, 469-476, 559-564, 609-614, 673-678, 681, 692-697, 706-711, 719-724, 729-734, 748-753, 784-789, 904-909, and 920-925).

[0338] First, a phylogenetic tree was built using RAxML or MEGA, as described in A. Stamatakis: “RAXML Version 8: A tool for Phylogenetic Analysis and Post-Analysis of Large Phylogenies” In Bioinformatics, 2014; Nei M. and Kumar S. (2000) Molecular Evolution and Phylogenetics Oxford University Press, New York: Tamura K., Stecher G., and Kumar S. (2021) MEGA 11: Molecular Evolutionary Genetics Analysis Version 11 Molecular Biology and Evolution https://doi.org/10.1093/molbev/msab120; and Stecher G., Tamura K., and Kumar S (2020) Molecular Evolutionary Genetics Analysis (MEGA) for macOS Molecular Biology and Evolution 37:1237-1239, herein incorporated by reference in their entireties.

[0339] For analysis with MEGA, the evolutionary history was inferred by using the Maximum Likelihood method and General Time Reversible model. The tree with the highest log likelihood (-25977.38) was selected. Initial tree(s) for the heuristic search were obtained automatically by applying Neighbor-Join and BioNJ algorithms to a matrix of pairwise distances estimated using the Maximum Composite Likelihood (MCL) approach, and then selecting the topology with superior log likelihood value. A discrete Gamma distribution was used to model evolutionary rate differences among sites (5 categories (+G, parameter=0.9471)). The rate variation model allowed for some sites to be evolutionarily invariable ([+I], 0.30% sites). This analysis involved 408 nucleotide sequences. There were a total of 467 positions in the final dataset. Evolutionary analyses were conducted in MEGA11.

[0340] The phyloFit program from PHAST (Phylogenetic Analysis with Space/Time Models) package was used to generate a phylogenetic model by fitting the tree models to the multiple sequence alignment by maximum likelihood using the HKY85 substitution model. The PREQUEL (Probabilistic REconstruction of ancestral seQUEnces, Largely) program from PHAST was used to compute marginal probability distributions for bases at ancestral nodes in the phylogenetic tree, using the tree model defined by phyloFit. Distributions were computed using the sum-product algorithm, assuming independence of sites. The identified sequences (SEQ ID NOs: 936-1303) correspond to nodes in the original tree.

### INCORPORATION BY REFERENCE

[0341] The entire disclosure of each of the patent and scientific documents referred to herein is incorporated by reference for all purposes.

### EQUIVALENTS

[0342] The invention may be embodied in other specific forms without departing from the spirit or essential characteristics thereof. The foregoing embodiments are therefore to be considered in all respects illustrative rather than limiting on the invention described herein. Scope of the invention is thus indicated by the appended claims rather than by the foregoing description, and all changes that come within the meaning and range of equivalency of the claims are intended to be embraced therein.

### SEQUENCE LISTING

H1 Sequences:
>Aardvark_H1_Bidirectional_Promoter
(SEQ ID NO: 25)
GGAACGAAACTAACTTGGCCAAACTATATAAGAATGCCATAGCTTTCAACATTTAATGGTTAGGGTGCCTTCTCA
TAATACACAGCGACATGCAAATATCATGGCCCTTCCAGGAGGCGTGCCTCCCCGTCCCGCGTGTGCGTCTTGCTT
GTGCGCAGGCGCGCTGCTCTTCCGGCTGTAAGACTTTGAGCCCTTGATTTCTGTGAGCGGGTTCGTGAAGTCAGT
GTTCTGGCTCC
>Angolan_colobus_H1_Bidirectional_Promoter
(SEQ ID NO: 26)
GGGGAAGGGTGGTCCTCCATAGAACTTATAAGACTCCCATACTCAAAGACATTTCACGTTTATGGTGACTTCCCA
GAAGACATAGCGACATGCAAATATTGCAGGGCGTCACACCCCCTGTCCCTTACAGCTCTCTTCCTGCCAGGGCGC
ACGCGCGCTGGGTGTTCCCGCGTAGTGACACTGGGCCCGCGATTCCTTGGAACGGGTTGATGACGTCAGCGTTCG
AATTAC
>Big_brown_bat_H1_Bidirectional_Promoter
(SEQ ID NO: 27)
GGGAAGCGAGCGTCACACGGCGGATATATAAGGCCCCCTTACCTGAAGGCCTTTTACGGTTAGGGTGACTTCCCA
CAACACTTAGCGACATGCAAATTTAGACGGGCGTGCCTCCCCGTCCCTGGGCAACTTCTCTCCTGGACACGCGCG
CTCGCGCTGAGTGTTCCCGCCTTTTGACTCCAGCCGAGCGAATCCTGGGAGAGGGCAGATGACGTCAACAGTCAG
GCTCC
>Black_flying-fox_H1_Bidirectional_Promoter
(SEQ ID NO: 28)
GAGAGAAAAAGCCTGCACGCAGAATATATAAGGATCCCATATCTGAAGACATTTTACGGTTACGGTGATTTCCCA
CAACACATAGCGACATGTAAATATAGTGGGGCATGCCTCTCCTGTCCCTGGGCAGCTTCTCGCCAGAACGCACGC
GCGGTGCGTGTTCCCGCCTTGTGACTAAGTTGGCGAGTCAGGGAGGAGATTGATGATGTCATCATCGTCAGCTCA
CCCGCTCC
>Black_snub-nosed_monkey_H1_Bidirectional_Promoter
(SEQ ID NO: 29)
GGGGAAGGGTGGTCCTACACAGAGCTTATAAGACTCCCATACTCAAAGACATTTCTCGTTTATGGTGACTTCCCA
GAAGCCATAGCGACATGCAAATATTGCAGGGCGTCACACCCCTGTCCCTTACAGCCATCTTCCTGCCAGGGCGCA
CGCGCGCTGGGTGTTCCCGCGTAGTGACACTGGGCCCGCGATTCCTTGGAGCGGGTTGATGACGTCAGCGTTCGA
CTTCC
>Bonobo_H1_Bidirectional_Promoter
(SEQ ID NO: 30)
GGGAAAGGGTGGTGCCACACAGAACTTATAAGACTCCCATATCCAAAGACATTTCACGTTTATGGTGATTTCCCA
GAACACATAGCGACATGCAAATATTGCAGGGCGCCACTCCCCTGTCCCTCACAGCCATCTTCCTGCCAGGGCGCA
CGCGCGCTGGGTGTTCCCGCCTAGTGACACTGGGCCCGCGATTCCTTGGAGCGGGTTGATGACGTCAGCGTTCGA
ATTCC
>Brush-tailed_rat_H1_Bidirectional_Promoter
(SEQ ID NO: 31)
GAAGGAAGTTAGTCACAAACGCAAATTATAAGAGGTCCAAAGCTCAGTGTACTCTATGGTTAGGGTGACTTCCCA
CAATACATAGCGATATGCAGATTTCTTCCCCAGTCTGGCCCGCTGGGCCCTCCCTAGAGCGCATGCGCTGCAAGT
CCACGGCGGAGCACCGGGCGGGCGATCCCGGAGCGGGTTGATGACGTCAGCGTTTGAACTCC
>Camel_H1_Bidirectional_Promoter
(SEQ ID NO: 32)
GAGAAAGGGTGGGCTCACGCCACCTTTATAAGGCTCCCAAACTTAAAGACATTTCTCGGTTATGGCGACTTCCCA
CAACACATAGCGACATGCAAATACTGCAGACCTGTGGCGCCGACCCGGTCCTGTGCAGCCATCTTTAAGGCTGGG
ACGCACGCGCGCTGCGTGTTCCCGCCCTGTGACTGCGCCGGCGATTACTGGGAGAGGATTGATGACGTCAACGTT
CGGGTTCC
>Cape_golden_mole_H1_Bidirectional_Promoter
(SEQ ID NO: 33)
GGGCTAACACTGTGTTGGTATTAGCTTATAAGAAACCCAAATATAAAGTCATTTAACGCTTAGTGTGACTTCCCA
TCATACAAAGCGACATGCAAATATCATGGGCCTTCCGGGAGGCGTGCCTTCCCGTCCTGCGTACTGGAGTTCTCT
CTGGGGCGCACGCGCGCTATGTGTTTCCCGCCTTGTGACTTAGGGCGGGCGATTCCTGAGATCCGAATGGTGACG
TCAACTTTCAGGCTCG
>Chinchilla_H1_Bidirectional_Promoter
(SEQ ID NO: 34)
GAAAGCCGAAGGTTTGGAGCGAAACTTATAAGAAGCCCAAATCTCACTATATTTTTAGGTCATGGCGACTTCCCA
CAAGCCACAGCGATATGTAGATATAGGAGCCCCTCCCAGTTCTGGTCCTTCCGCGTCTCACTAAAGCGCATGCGC
TGCAGGTTCGCGGCCTGCGACTGGGCCTGCAATTCCTGGGAGCGAGTTGATGACGTCAGCGTTTGAACTCC
>Chinese_hamster_H1_Bidirectional_Promoter
(SEQ ID NO: 35)
ACAGCCTGGTGAATGGCGGGCTTTATAAGGCTCCGGAGAGAAAGCGCTTTCTCAGTTATGGTGGTTTCCCACAAG
GCACAGCGCACACTTTATTTGCATGCGATCTAGCGCAGGCTCCCGCTCCAGACAAGAAGCCCGCGCTTTTCGGCT
GCTTATGATGACGTCGGGCCTCAAGCGCC
>Chinese_tree_shrew_H1_Bidirectional_Promoter
(SEQ ID NO: 36)
GGGGGAAGCTGGGTCCACTGAGTTCTTATAAGGTTTCCAGTCCTAGAGCGATTTTACCATTACGGTGATTTCCCA
GCATCCGTAGCTACATGCAAATAGCGCGGGGCGCGTCTCTCAGGTCCCTCCCCCGTGCCCTCTCACTGTACGTAC
CCGCGTCCTAGGGACGCCGCGCCCGGGGTTCCCGGACGTCAGCGTTCCGACGCA
>Consensus-1_H1_Bidirectional_Promoter
(SEQ ID NO: 37)
GGGGAAGGGTGGTCCCACACAGAACTTATAAGGCTCCCATACCTAAAGACATTTCACGGTTATGGTGACTTCCCA
CAAGACATAGCGACATGCAAATATTGCAGGGCGTCCCTCCCCTGTCCCTAGGCATCTTCTCGCCAGGGCGCACGC
GCGCTGCGTGTTCCCGCCTTGTGACACTGGGCCCGCGATTCCTGGGAGCGGGTTGATGACGTCAGCGTTCGAGCT
CC
>David's_myotis_H1_Bidirectional_Promoter
(SEQ ID NO: 38)
GAGAGGGGCTGTGCACACGGCGGATATATAAGGCCCCCTTATGAATAACCCTTTATAAGTTATGGTGATTTCCCA
CAACGCATAGCGACATGCAAATTCGATGGGCGTGCCTCCTCTGTCCCCAGGCAACTTCTCTCCTGGACGCGCGCT
CCTCGCTGCGTGTTCCCGCCTTTTGACTCCAGCCGAGCGAATCCTGGGAGAGGGCAGGTGACGTCAACAGTCAGG
CTCG
>Drill_H1_Bidirectional_Promoter
(SEQ ID NO: 39)
GGGGAAAGGTGGTCCCACACAGAACTTATAAGATTCCCATACTCAAAGACATTTCTCGTTTATGGTGACTTCCCA
GAAGACACAGCGACATGCAAATATTGTAGGGCGTCACACCCCTGTCCCTCACAGTCATCTTCCTGCCAGGGCGCA
CGCGCGCTGGATGTTCCCGCGTAGTGACCCTGGGCCCGCGATTCCTTGGAGCGGGTTGATGACGTCAGCGTTCGA
ATTCC
>Gibbon_H1_Bidirectional_Promoter
(SEQ ID NO: 40)
GGGGAAAAGTAGTTTTTTTTAGACCTTATAAGATTCCCAAACCCAAAGACATTTCTCGTTTATGGTGACTTCCCA
GAAGACATAGCGACATGCAAATATTGCAGGGCGCCACTCCCCTGTCCCTCACAGCCATCTTCCTGCCAGGGCGCA
CGCGCGCTGGGTGTTCCCGCCTAGTGACACTCGGCCCGCGATTCCTTGGAGCGGGTTGATGACGTCAGCGTTCGA
ATTCC
>Goat_H1_Bidirectional_Promoter
(SEQ ID NO: 41)
GGCAAACAACGCGCGCAAACAGCATTTATAATGAGCTCATACCTAAAGCCACTTTACGATTACGGTGACTTCCCA
CAAGACATTGCGGCATGCAAATATTTTAGTGCGTCCCGCCCCTGGTAGTTCCACGCTAGGACGCACACGCACTAC
GGTTCCCGCCTTTAGACTGCGCTGGCGATTCCAGCGAGCGGACTGATGACGTCAGCGTTGGGGCTCC
>Golden_hamster_H1_Bidirectional_Promoter
(SEQ ID NO: 42)
GTGGCCCGGCGGCGGGCGAACTATATAAGCCTCCGCGGAGGAAGCGCTTTCTCGGTTAGGGTGGTTTCCCACAAG
CCTCAGCGCACAGCCTCTTTGCATACGCTCCCGCCGCCCCCGGGCTCCTCCCTCTCCGCACAAGAAGCCCGCGCA
TTTCGACTGCGGATGATGACGTCGGGCCTCGAGCGCC
>Golden_snub-nosed_monkey_H1_Bidirectional_Promoter
(SEQ ID NO: 43)
GGGGAAGGGTGGTCCTACACAGAGCTTATAAGACTCCCATACTCAAAGACATTTCTCGTTTATGGTGACTTCCCA
GAAGCCATAGCGACATGCAAATATTGCAGGGCGTCACACCCCTGTCCCTTACAGCCATCTTCCTGCCAGGGCGCA
CGCGCGCTGGGTGTTCCCGCGTAGTGACACTGGGCCCGCGATTCCTTGGAGCGGGTTGATGACGTCAGCGTTCGA
ATTCC
>Hedgehog_H1_Bidirectional_Promoter
(SEQ ID NO: 44)
GCCTAAACCGGCTCTTTCAACAGACTTATAAGGACCTCTTATCTTAGGACATTTTTTTCTTAGGGTAACTTCCCA
TGATGCACAGCGATATGTAAATATGGCGCCGCGAGTCTCTCCTAGGCGTCTCCCCAGGACGCAGGCGCACTGCTT
GTTCCCGCGTTAACATTGCTGATTCTGGGAGACTGCTGATGACGTCAGCGTCCAGTCTAC
>Killer_whale_H1_Bidirectional_Promoter
(SEQ ID NO: 45)
GCCGAAAACCAGGCTCAAGCCACATTTATAAGGCTCCCAAACCTAAATACATTTGTCGGTTATGGTGACTTCCCG
CAACACATTGCGACATGCAAATACTGCGGAGCGTTCCTCCCCTAGCAACTCCTCGCTGGGACGCACGCGCGCTAC
GTGCTCCCGCCTTTTGACCGAGCCGGCGATACTTGGGAGAGGGTTGATGACGTCAGCGTTCTGGCTCC
>Lesser_Egyptian_jerboa_H1_Bidirectional_Promoter
(SEQ ID NO: 46)
GGGCAGACCTTAACCAAGCGGAGGTTTATAAAGCGCCCACATTCAGTGACACTTCTCAGTCACGGTGACTTCCCA
CAAAACACAGCGCATGCAAATATTATGGCGGGAGGGGGGGTGCTCGCCTGGGCGCACGCGCGCTGTGGGTTCCCG
CGAGCGGGATGATGACGTCACTAAGTGAGC
>Manatee_H1_Bidirectional_Promoter
(SEQ ID NO: 47)
GAGCCAAACAGCTGTTGGTCACATTATATAAGAATCCCATATATAAAGACATTTTTGGCGTAGGGTGACTTCCCA
CAATACATAGCGACATGCAAATACCATGGTCCTCCAGGAGGCGTGCCTCCCCGTCCCCTTGGTCCGGTTCTTGCT
GGGGCGCACGCGCGCTGCGTGTTCCCGGTCTGTGACTCAGCTCGCGATTCCGGAGAGCGGATTGGTGAAGTCAAT
GTTCTGGGTCC
>Mas_night_monkey_H1_Bidirectional_Promoter
(SEQ ID NO: 48)
GGGGAAGGGTGGTCCTATACAGAACTTATAAGACTCCCATACCCAAAGACATTTCACGGTTATGGTGACTTCCCA
GAAGACACAGCGACATGCAAATATTGTAGGTCGTGCCTCGCTTGTCCCTCAGTAGTCTTCCTTTCAGAGCGCACG
CGCGCTGGGTGTCCCGCCAACTGACACTGGGCTCGCGATTCCTTGGAGCGGGTTGATGACGTCAGCGTTCGAATT
CC
>Microbat_H1_Bidirectional_Promoter
(SEQ ID NO: 49)
GGAGAAGGAGGCGTAGACGGCGGATATATAAGGCCCCCTTATGTGTAGTCCTTTTACGGTTAGGGTGACTTCCCA
CAACGCATAGCGACATGCAAATTTGACGGGCGTGCCTCCTCTGTCCCCGGGCAACTTCTCTCCTGGACGCGCGCT
CGCGCTGCGTGTTCCCGCCTTTTGACTCCAGCCGAGCGAATCCTGGGAGAGGGCAGGTGACGTCAACAGTCAGGC
TCG
>Opossum_H1_Bidirectional_Promoter
(SEQ ID NO: 50)
GGTGCGGGGCCTCAAAGAGAGCGATATATAACGCTCACAAAACCCGTGCTATTTCTTACAGAGGGTGATATCCCC
ATGATCCCCGGCGGTATGCAAATAGTAGTCGCGTCAGAGCAGAGCGCAGTCAGCCGCTCTCTCCTAGCGCGGGAA
ATCTATTTCTTCTTCAGTCTCGGTAACGAGCGCATGCGCATACTGTAGGTGACCTACGGTTTTGTCAGGAATCGG
TTGGGAGCACC
>Pacific_walrus_H1_Bidirectional_Promoter
(SEQ ID NO: 51)
GGGAAACGGTGGCCCCAAAGAGCATTTATAAAGCTCCCTCAACTAAATGCATTTATCAGTTATGGTGACTTCCCA
CAATACATCGCAACATGCAAACATCGCGGGGAGTACCTCCCCTGTCCCTACGTGTCTTCTCAGGACGCACGCACG
CGCGCTGTGTTCCCGCCCTGTGACTCTAGGCGGGCAATTCCTAGAAGACGCTTGCTGACGGGAACGTTCCGGCTC
C
>Pig-tailed_macaque_H1_Bidirectional_Promoter
(SEQ ID NO: 52)
GGGGAAAGCCGATCCCAGCCAGAACTTATAAGATTCCCATACTCAAAGACATTTCTCGTTTATGGTGACTTCCCA
GAAGACACAGCGACATGCAAATATTGTAGGGCGTCACACCCCTGTCCCTCACAGTCATCTTCCTGCCAGGGCGCA
CGCGCGCTGGGTGTTCCCGCGTAGTGACACTGGGCCCGCGATTCCTTGGAGCGGGTTGATGACGTCAGCGTTCGA
ATTCC
>Prairie_vole_H1_Bidirectional_Promoter
(SEQ ID NO: 53)
GGGAAGGCGGGGCGGCGGCACTAAAAGGCTCCGGAGCGGCCCAGACTTTACAGTTATGGTGGCTTCCCACGAGGC
GCAGCGCCACTCATTTGCATGGACCCGCCCCAGACGGGAAGCCCGCACCGCTCATTTGTGTGGCCCCGCCCCAGA
CGGGAAGCCCGCGCCACTCATTTGC
>Rhesus_H1_Bidirectional_Promoter
(SEQ ID NO: 54)
GGGGAAGGGTGGTCCCACACAGAACTTATAAGATTCCCATACTCAAAGACCTTTCTCGTTTATGGTGACTTCCCA
GAAGACACAGCGACATGCAAATATTGTAGGGCGTCACACCCCTGTCCCTCACAGTCATCTTCCTGCCAGGGCGCA
CGCGCGCTGGGTGTTCCCGCGTAGTGACACTGGGCCCGCGATTCCTTGGAGCGGGTTGATGACGTCAGCGTTCGA
ATTCC
>Ryukyu_mouse_H1_Bidirectional_Promoter
(SEQ ID NO: 55)
TGGAGGGTGGAGACCGGCCGCCACTATAAGGCTCGAAAGAGGAATAAATTTTACGTTTAGGGTGATTTCCCACAA
AGCACAGCGCGTAATTTGCATGTGCTCTATCCCAGGCTCCAGTGCCAGACAAGAAGCCCGCGCATCCGGGCAAGG
GATGATGACGTCGTCCTTCAAGAGCG
>Shrew_H1_Bidirectional_Promoter
(SEQ ID NO: 56)
GCGTAAGACGCGCCGCATCGCGTACTTATAAGGATCCCCTGGTCAACGATCTTTTACAGTTAGGGTGACTTCCCA
CAGTACACGGCGGTATTCAAATATGAAGGGCGTGTCTAGTCCGGGTCCTGGCTAGGCGCATGTGCAGTGCTGGTT
CCCGCCACTTCCGACGTCTACGTTTAGACTCC
>Shrew_mouse_H1_Bidirectional_Promoter
(SEQ ID NO: 57)
TGAAGGCTGTAGACCGGCCGCCACTATAAGGCTCGAAAGAGGAATAAGTTTTTCGCTTACGGTGACTTCCCACAA
AGCACAGCGCGTAATTTGCATGTACTCTATCCCAGGCTTCCTGTTCCAGACTAGAAGCCCGCGCATCCGGGCAAG
GGACGATGACATCATCCCCATCCCTCCAGCGCG
>Sifaka_H1_Bidirectional_Promoter
(SEQ ID NO: 58)
GAGGGAAAAGGGTTCTGCACAGAATTTATAAGGCTCCCAAATCTAAAAACATTTCACCATTATGGTGATTTCCCA
CAACACATAGCGACATGCAAATATCTCAGAGCGTACCTCCCCTGTCCTATACGGGCGTCAACTCGCCATGGCGCA
CGCGCGTTGTGTGTTTCCCGCCTGTGACTCTGGGCCCGCGATTCCTCCCAGCGGGTTGAGTACGTCAGCTCCGGT
GCTTC
>Sooty_mangabey_H1_Bidirectional_Promoter
(SEQ ID NO: 59)
GGGGAAAGGTGGTCCCACACCGAACTTATAAGACTCCCATACTCAAAGACATTTCTCGTTTATGGTGACTTCCCA
GAAGACACAGCGACATGCAAATATTGTAGGGCGTCACACCCCTGTCCCTCACAGTCATCTTCCTGCCAGGGCGCA
CGCGCGCTGGGTGTTCCCGCGTAGTGACACTGGGCCCGCGATTCCTTGCAGCGGGTTGGTGACGTCAGCGTTCGA
ATTCC
>Squirrel_monkey_H1_Bidirectional_Promoter
(SEQ ID NO: 60)
GGGGAAGGGTGGTCCTTCGCAGAACTTATAAGATTCCCAGTCCCGAGGACATTTCTAGATTATGGTGACTTCCCA
GAATACACAGCGACATGCAAATATTGCAGGTCGTGCCTCGCCTGTCCCTCACTGTCGTCTTCCTGCCAGGGCGCA
CGCGCGCTGGGTGTCCCGCCAACTGACACTGGGCTCGCGATTCCTTGGAGCGGGTTGATGACGTCAGCGTTCGAA
TTCC
>Star-nosed_mole_H1_Bidirectional_Promoter
(SEQ ID NO: 61)
GCGCAGAGACAAGCTTAGCTAGAATTTATAAGGCGCCCATACTTGCAGACATATATCGGTTAGGGTGACTTCCCA
CAAGCCATAGCGACATGCAAATAGAGAGGGCGGGCTTCCCCTGAGCTTAGGCGTCTTCTTACGAAGTCGCGAGCG
CGTCGCGCGCCTGTTCCCGCCCGGTCACTATTGGCCTGTCACTATTGTCATTCCGCCCTTCCCGGGCGGAGTCTG
GTGACTTTCGGTTCC
>Synthetic-1_H1_Bidirectional_Promoter
(SEQ ID NO: 62)
GCAGCGCAGCCCTCTCGCCGCTTATAAAGTGCCGCCCGCACGGCCCTTCTCGCTCACGGCGACTTCCCATAAAGC
ACAGCGCGTAATTTGCATGCGCTCTACCCCAGGCTCCTGTGCTAGACAAGAAGCCCGCGCATCCGGGCAAGGGAT
GATGACGTCAGATCTCC
>Synthetic-2_H1_Bidirectional_Promoter
(SEQ ID NO: 63)
GGGGAAAAGTAGTGCCGCTTATAAAGTGCCGCCCGCACGGCCCTTCTCGCTCACGGCGACTTCCCATAAAGCACA
GCGCGTAATTTGCATGCGCTCTACCCCAGGCTCCTGTGCTAGACAAGAAGCCCGCGCATCCCGGACGTCAGATCT
CC
>Tenrec_H1_Bidirectional_Promoter
(SEQ ID NO: 64)
AGGTTAAAGCCGCGTCGCCGCGCGCTTATAAGAATCCGGGAACTAACTACATTTCAAGGTCAGGGTGATTACCCA
CCCTGCATAGCGACATGCAAATAGCACGGAACGTCCAGGAGACGTGCCTCTAGGTCTTGGGGAGGGAGGAGTTCG
GCCCAGCGCGCACGCGCACTACGTGTTCCCGCCCGCTGTCTCGGGGGGGGAGATCCCGGGTAGGTGACGTCAGTC
CTCGGCTTC
>Tibetan_antelope_H1_Bidirectional_Promoter
(SEQ ID NO: 65)
GGCAAACGACTCCCGCAAACAGCATTTATAATGCGCTCATACATAAAGCCACTTTTCGGTTACGGTGACTTCCCA
CAAGACATTGCGACATGCAAATATTTTAGTGCATCCCGCCCCTGGTAGCTCCACGCTAGGACGCACACGCACTAC
GGTTCCCGCCTTTAGACTGCCGGGGCGATTCCAGGGAGCGGACTGATGACGTCAGCGTTCGGACTCC
>Tree_Shrew_H1_Bidirectional_Promoter
(SEQ ID NO: 66)
GGGGGAAGCTGGGTCCACTGAGTTCTTATAAGGTTTCCAGTCCTAGAGCGATTTTACCATTGCGGTGATTTCCCA
GCATCCGTAGCTACATGCAAATAGCGCGGGGCGCGTCTCTCAGGTCCCTCCCCCGTGCCCTCTCACTGTACGTAC
CCGCGTCCTAGGGACGCCGCGCCCGGGGTTCCCGGACGTCAGCGTTCCGACGCA
>Weddell_seal_H1_Bidirectional_Promoter
(SEQ ID NO: 67)
GGGGAAGAGTGGCCCCAGAGAGCATTTATAAGGCTCCCGCACCTAAATGCATTTATCAGTTATGGTGACTTCCCA
CAATACATAGCAACATGCAAATATAGCGGGGAGTACCTCCCCTGTCCCTACGTGTCTTCTCAGGACGCACGCACG
CGGGCTGTGTTCCCGCCCTGTGACTCTAAGCGGGCAATTCCTGGAAGAGGCTTGCTGACGGGGACGTTCAGGCTC
C
>White_rhinoceros_H1_Bidirectional_Promoter
(SEQ ID NO: 68)
GGAGCAAACATGCGCCAGGCAGCCTTTATAAGACTCACATATCTAAAGACATTTCACAGTTAGGGTGACTTCCCA
CAGGACACAGCGATATGCAAATATCGTGGAGCGTACCTCCCCAGTCTCCGGGCATCTTCTCGCCTACACGCACGC
GCGCCGCGTGTTCCCGCCCTGTGACGCTAGGTGGGCCTTTCATGGGAGAGGGTTGATGACGTCAACATTCGGACT
CC
>White-faced_sapajou_HI_Bidirectional_Promoter
(SEQ ID NO: 69)
GGGGAAGGGGTGGCCTACGCAGAACTTATAAGATTCCCACACCTAAAGACATTTAACGATTATGGTGACTTCCCA
GAATACACAGCGACATGCAAATATTGCAGGTCGTACCTCGCCTGTCCCCCACAGTCGTCTTCCTGCCAGGGCGCA
CGCGCGCTGGGTGTCCCGCCAACTGACAGTGGACTCGCGATTCCTTGGAGCGGGTTGATGACGTCAAAGTTCGAA
TGCC
>Alpaca_H1_Bidirectional_Promoter
(SEQ ID NO: 70)
GGGAAAGGGTGGGCTCACGCAGCCTTTATAAGACTCCCAAACTTAAAGACATTTCTCGGTTATGGCGACTTCCCA
CAAGACATAGCGACATGCAAATACTGCAGACCTGTGGCGCCGACCCGGTCCTGTGCAGCCATCTTTACGGCTGGG
ACGCACGCGCGCTGCGTGTTCCCGCCCTGTGACTGCGCCGGCGATTACTGGGAGAGGATTGATGACGTCAACGTT
CGGGTTCC
>Armadillo_H1_Bidirectional_Promoter
(SEQ ID NO: 71)
AAAGCGATAGTTTTTTAAACTGGACTTATAAGGCACCCATATCTACGTATATTTCATGGTTAGGGTGATTTCCCA
CAACACATAGCGAAATGCAAATATGTGGAGCGGGCGCTGAGGCGTGGTCGGGCGCAAGCGCGCTGCGACTTCCCG
CCTTTCGGCCCTAGGCCCCAGATTCCTGGGAGCTGGATGATGACGTTGACGTTCGGATACC
>Baboon_H1_Bidirectional_Promoter
(SEQ ID NO: 72)
GGGGAAAGGTGGTACCATACAGAACTTATAAGATTCCCATACTCAAAGACATTTCACGATTATGGTGACTTCCCA
GAAGACACAGCGACATGCAAATATTGTAGGGCGTCACACCCCCTGTCCCTCACAGTCATCTTCCTGCCAGGGCGC
ACGCGCGCTGGGTGTTCCCGCGTAGTGACACTGGGCCCGCGATTCCTTGGAGCGGGTTGATGACGTCAGCGTTCG
AATTCC
>Bottlenose_dolphin_H1_Bidirectional_Promoter
(SEQ ID NO: 73)
GCCGAAAACCAGGCTCAAGCCACATTTATAAGGCTCCCAAATCTAAGTACATTTGTCGGTTATGGTGACTTCCCG
CACCACATTGCGACATGCAAATACTGCGGAGCGTCCCTCCCCTGGCAACTCCTCGCTGGGACGCACGCGCGCTAC
GTGCTCCCGCCTTTTGACTGCGCCGGCGATACTTGGGAGAGGGTTGATGACGTCAGCGTTCTGGCTCC
>Bushbaby_H1_Bidirectional_Promoter
(SEQ ID NO: 74)
GCCTAAAAGGGCGCTTGCACAGAATTTATAAGGTTCCCAAACAGAGACACATTTCATTATTATGGTGACTTCCCA
CAATGCACAGCGCCATGCAAATATGCTAGGACCTGCCTCCCCACACCCGCTACCTTAAGGTCGTCAACTAACCAG
TGCGCGCGCGCACTGCGCGTTTCCCGCCGGTGACTCAATGCCCGCGTTTGGTGGGAGCTAGTTGGTGACCTCAGT
TCTGGAGGCTC
>Cat_H1_Bidirectional_Promoter
(SEQ ID NO: 75)
GGGAAAGGGTGGCCCCGCCGAGCATTTATAAGACTCCCATACCTAAAGACATTTCTCAGTTATGGTGATTTCCCA
CAACACACAGCAACATGCAAATATCGAGGGGTGTACCGCCCCTGTCCTTAGACGTCTTCTCTCCAGGACGCACGC
GCGCTGTATTCCCGCCTTGTGACTCTAGGCGGGCGATTCCTGGGAGAGGGTTGATGACGTCCAAGTTCTGGCTTC
>Chimp_H1_Bidirectional_Promoter
(SEQ ID NO: 76)
GGGAAAGGGTGGTGCCACACAGAACTTATAAGACTCCCATATGCAAAGACATTTCTCGTTTATGGTGATTTCCCA
GAACACATAGCGACATGCAAATATTGCAGGGCGCCACTCCCCTGTCCCTCACTGCCATCTTCCTGCCAGGGCGCA
CGCGCGCTGGGTGTTCCCGCCTAGTGACACTGGGCCCGCGATTCCTTGGAGCGGGTTGATGACGTCAGCGTTCGA
ATTCC
>Cow_H1_Bidirectional_Promoter
(SEQ ID NO: 77)
GGCAAACACCGCACGCAAATAGCACTTATAATGTGCTCATACCTAGAGCCACTTTTCGGTTACGGTGACTTCTCA
AAAAGACAGTGGAACATGCAAATATTACAGTGCGTCCCGCCCCTGGTAGGTCTACGCTAGGACGCACGCGCACTA
CGGTTCCCGCCTATAGACTGCGCTGGCGATTCCTGGGAGCGGACTGATGACGTCAGCGTTCGGGATCC
>Crab-eating_macaque_H1_Bidirectional_Promoter
(SEQ ID NO: 78)
GGGGAAGGGTGGTCCCACACAGAACTTATAAGATTCCCATACTCAAAGACATTTCTCGTTTATGGTGACTTCCCA
GAAGACACAGCGACATGCAAATATTGTAGGGCGTCACACCCCTGTCCCTCACAGTCATCTTCCTGCCAGGGCGCA
CGCGCGCTGGGTGTTCCCGCGTAGTGACACTGGGCCCGCGATTCCTTGGAGCGGGTTGATGACGTCAGCGTTCGA
ATTCC
>Dog_H1_Bidirectional_Promoter
(SEQ ID NO: 79)
GCAGCGCAGCCCTCTCGCCGCTTATAAAGTGCCGCCCGCACGGCCCTTCTCGCTCACGGCGACTTCCCATAACAC
ACAGCAGCATGCAAATACCGCGGGGAGCCCCGCCCCGCCCCGGCCCCCGCACCGCCTCGGGACGCATGCGCCGGC
TCTCCGTTCCCGCCTTGGGCCGGCGGCGGGGGGGGGGGGAGCGGGCGGGAGCGGCTCCGGCGAGCGGGCGCC
>Elephant_H1_Bidirectional_Promoter
(SEQ ID NO: 80)
GGGATAGGAACAAATTCGTCAGGATTTATAAGACTCTCAGAGCTGTAGACATTTCACAGTTAGGGCGATGTCCCA
CAATACATAGCAACATGCAAATACATGAGCCTTCTAGGAGGCCAGCCTCCCCGTCCGCGTGGTCATCTTCTCGCT
AGGGCGCACGCCCGCTGCGTGTTCCCGCTCTGTGACCAGGCAGGCGATTCCTGAGAACCGCTTGGTGACGTCAGT
GTTCTGGCTCC
>European_Hedgehog_H1_Bidirectional_Promoter
(SEQ ID NO: 81)
GCCTAAACCGGCTCTTTCGACAGACTTATAAGGACCTCTTATCTTAGGACATTTTTTTGTTAGGGTAACTTCCCA
CGATGCATAGCGATATGTAAATATGGCGCCGCGAGTCTCTCCTAGGCGTCTCCCCAGGACGCAGGCGCACTGCTT
GTTCCCGCGTTAACATTGCTGATTCTGGGAGACTGCTGATGACGTCAGCGTCCAGTCTAC
>Ferret_H1_Bidirectional_Promoter
(SEQ ID NO: 82)
GGGAAAGGGTGGACCCACCGAGCATTTATAAGGCTCCCGCATCTAAAGACATTTTACAGTTATGGTGACTTCCCA
CAACGCGTAGCAACATGCAAATATCGTGGAGAGTACCGCCCCTGTCCCCACGCGTCTTCTCAGCACGCACGCACG
CGCGCTGTGTTCCCGCCCTGTGACTCCAGGCGGGTATTTCCAGGGGCGGGTTTGCTGACAGGAACGTTCAGGCTT
C
>Gorilla_H1_Bidirectional_Promoter
(SEQ ID NO: 83)
GGGAAAGGGTGGTCCCACACAGAACTTATAAGACTCCCATATCCAAAGACATTTCACGGTTATGGTGATTTCCCA
GAACACATAGCGACATGTAAATATTGCAGGGCGCCACTCCCCAGTCCCTCACAGCCATCTTCCTGCCAGGGCGCA
CGCGCGCTGGGTGTTCCCGCCTAGTGACACTGGGCCCGCGATTCCTTGGAGCGGGTTGATGACGTCAGCGTTCGA
ATTCC
>Green_monkey_H1_Bidirectional_Promoter
(SEQ ID NO: 84)
GGGGAAGGGTGGTCCCTTACAGAACTTATAAGATTCCCAAACTCAAAGACATTTCACGTTTATGGTGACTTCCCA
GAAGACATAGCGACATGCAAATATTGCAGGGCGTCACACCCCTCTCCCTCACAGTCATCTTCCTGCCAGGGCGCA
CGCGCGCTGGGTGTTCTCGCGTAGTGACACTGGGCCCGCGATTCCTTGGAGCGGGTTGATGACGTCAGCGTTCGA
ATTCC
>Guinea_pig_H1_Bidirectional_Promoter
(SEQ ID NO: 85)
GAGAAAGAAAGGCTCAAACCTAGCCTTATAAGGCTCCCAAATGTCGGTATATTTTTTGGTTATGGTGACTTCCCA
CAATGCATAGCGATATGTAGATATAGGAGTACCTCCCACTTCTGGTCCGTCAGCTCTTTTCTAGGACGCGCGCGC
TGCAGGTTTCCAGCCTGTGATTGGGCCAGCAATTCCGGGAATGAATTGATGACGTCAGCGTTTGAATTCC
>Horse_H1_Bidirectional_Promoter
(SEQ ID NO: 86)
GGGGGAAAACAGCCCATGGCTGCATTTATAAGACTCACAGATCTAAAGCCATTTCACGAATAGGGTGACTTCCCA
CAATACACAGCGACATGCAAACATAGCGGGGCGTGCCTTTCCTGTACCTGGGCATCTCTCCTGGACGCACGCGCG
CCGGGTGTTCCCGCGCTGTGACTCTAGGCAAGCGCTTCCTGGGAGAGAGTTGATGACGGCAGCATTCGGGCTCC
>Human_H1_Bidirectional_Promoter
(SEQ ID NO: 87)
GGGAAAAAGTGGTCTCATACAGAACTTATAAGATTCCCAAATCCAAAGACATTTCACGTTTATGGTGATTTCCCA
GAACACATAGCGACATGCAAATATTGCAGGGCGCCACTCCCCTGTCCCTCACAGCCATCTTCCTGCCAGGGCGCA
CGCGCGCTGGGTGTTCCCGCCTAGTGACACTGGGCCCGCGATTCCTTGGAGCGGGTTGATGACGTCAGCGTTCGA
ATTCC
>Kangaroo_Rat_Bidirectional_Promoter
(SEQ ID NO: 88)
AGGAAAGACTTCGCTGAGGCAGACTTTATAAGGCTCCCGCGCAGAAAGAAACTTTATAGTTATGGTGATTTCCCA
CAAGCCACTGCGTCATGCAAATAAAGCAGGGTACGGCTTCCATGTACCTTAAGGTTTTTTTCTAGGCCGCGTACG
CTCTGCGTATTCAGCCACGTGACCCTGAGCCAGTGGTTGTTGGGAGCACGTTGTGGACCTCTGCGTTTGGATTCC
>Large_flying_fox_H1_Bidirectional_Promoter
(SEQ ID NO: 89)
GCGAGAAAAATTCTTCACGCAGAATATATAAGGATCCCATATCTGAAGACATTTTACGATTACGGCGATTTCCCA
CAACACATAGCGACATGTAAATGTAGTGGGGCATGCCTCCCCTGTCCCTGGGCAGCTTCTCGCCAGAACGCACGC
GCGGTGCGTGTTCCCGCCTTGTGACTAAGTTGGCGAGTCAGGGAGGAGATTGATGATGTCATCATCGTCAGCTCA
CCCGCTCC
>Little_Brown_Bat_H1_Bidirectional_Promoter
(SEQ ID NO: 90)
GGGAGAAGGAGGCGTAGAGGATATATAAGGCCCCCTTATGTGTAGTCCTTTTACGGTTAGGGTGACTTCCCACAA
CGCATAGCGACATGCAAATTTGACGGGCGTGCCTCCTCTGTCCCTGCGGGCAACTTCTCTCCTGGACGCGCGCGC
GCTGCGTGTTCCCGCCTTTTGACTCCAGCCGAGCGAATCCTGGGAGAGGGCAGGTGACGTCAACAGTCAGGCTCG
>Marmoset_H1_Bidirectional_Promoter
(SEQ ID NO: 91)
GAGGAAAAGTAGTCCCACAGACAACTTATAAGATTCCCATACCCTAAGACATTTCACGATTATGGTGACTTCCCA
GAAGACACAGCGACATGCAAATATTGCAGGTCGTGTTTCGCCTGTCCCTCACAGTCGTCTTCCTGCCAGGGCGCA
CGCGCGCTGGGTTTCCCGCCAACTGACGCTGGGCTCGCGATTCCTTGGAGCGGGTTGATGACGTCAGCGTTTGAA
TTCC
>Mouse_H1-1_Bidirectional_Promoter
(SEQ ID NO: 92)
TTCAGGATGTAGACCGGCCGCCACTATAAGGCTCGAAAGAGGAATAAATTTTTCGTTTAGGGTGATTTCCCACAA
AGCACAGCGCGTAATTTGCATGCGCTCTACCCCAGGCTCCTGTGCTAGACAAGAAGCCCGCGCATCCGGGCAAGG
GATGATGACGTCGTCCTTCAAGAGCG
>Mouse_H1-2_Bidirectional_Promoter
(SEQ ID NO: 93)
TTCAGGATGTAGACCGGCCGCCACTATAAGGCTCGAAAGAGGAATAAATTTTTCGTTTAGGGTGATTTCCCACAA
AGCACAGCGCGTAATTGCATGCGCTCTACCCCAGGCTCCTGTGCTAGACAAGAAGCCCGCGCATCCGGGCAAGGG
ATGATGACGTCGTCCTTCAAGAGCG
>Northern_Treeshrew_H1_Bidirectional_Promoter
(SEQ ID NO: 94)
GGGGGAAGCTGGGTCCACTGAGTTCTTATAAGGTTTCCAGTCCTAGAGCGATTTTACCATTGCGGTGATTTCCCA
GCATCCGTAGCTACATGCAAATAGCGCGGGGCGCGTCTCTCAGGTCCCTCCCCGCCCTCTCACTGTACGTACCCG
CGTCCTAGGGACGCCGCGCCCGGGGTTCCCGGACGTCAGCGTTCCGACGCA
>Orangutan_H1_Bidirectional_Promoter
(SEQ ID NO: 95)
GAGAAAGGGTGGTCCCGTCCAGAACTTATAAGATTCCCATACCCAAAGACATTTCACGTTTATGGTGACTTCCCA
GAATGCATAGCGACATGCAAATATTGCAGGGCGTCACTCCCCTGTCCCTCACAGCCATCTTCCTGCCAGGGCGCC
CGCGCGCTGGTGTTCCCGCCTAGTGACACTGGGCCCACGATTCCTTGGAGCGGGTTGATGACGTCAGCGCTCGTA
TTCC
>Panda_H1_Bidirectional_Promoter
(SEQ ID NO: 96)
AGGGAAAGCCGCGCCTGGGGCGGATTTATAAGGCTTCCATATCTAAAGGCATTTCACAGTCATGGTGACTTCCCA
CAATACATAGCAACATGCAAATATCGCGGGGAGAACCTCCCCTGTCCCTTGTACGCGGCTTCTAAAGACGCACGC
ACGCGCTCTGTGTTCCCGCCCTGTGACTCTAGGCGGGCAATTCCTGGGACAGTGTTCTGACGGGAACGTTCAGGC
TCC
>Pig_H1_Bidirectional_Promoter
(SEQ ID NO: 97)
GGAAAACTGCTTCTGTGAGCACTTATAAAACTCCCATAAGTAGAGAGATTTCATAGTTATGGTGATTTCCCATAA
GACATTGCGACATGCAAATATTGTGGCGCGTTCGTCCCCGTCCGGTGCAGGCAGCTTCGCTCCAGGACGCACGCG
CAATACATGTTCCCGCCTTGAGACTGCGCCGGCAGATTCCTAGGAAGTGGTTGATGACGTCGATGTTAGGGATCC
>Pika_H1_Bidirectional_Promoter
(SEQ ID NO: 98)
GGGGGAAGCTGGGCTCGATCAGCCTTTATAAAGCTCCAAAAACTCAAGACATTTTTCCGTTACGGTGGCTTCCCA
CAGTACACAGCGACATGCAAATAGGCGGACCGCTTCCCGCTCCGGCGCAGGCGCGCGGGCGCTGTCTCCCCTGGA
CGCGCGCTCGCGGTTCCCGGGAGCTGGCTGATGACGTTCGGTCTCC
>Rabbit_H1_Bidirectional_Promoter
(SEQ ID NO: 99)
GGGGAGAGGTGGATCCGAACAGACTTTATAAAGCTCCGAAAGCCCAAGGCATCTTTCCCTTACGGTAGCTTCCCA
CAAGACATAGCGACATGCAAATTTCAGACGCGCTTCTCGCCACAGCGCAAGCGCGCTGTGTGCTGACGCGGGAAC
GGGCCAGGGCGCGGTTCCCGGGAGCGGGTTGATGACGTTAGATCTCC
>Rat_H1_Bidirectional_Promoter
(SEQ ID NO: 100)
AGGAGTGTGAAGACCTGCCGCCATAATAAGACTCCAAAAGACAGTGAATTTAACACTTACGGTGACTTCCCACAA
AGCACAGCGTGTAATTTGCATGCGCTCTAGCCCAGGCTCCAGCTCCGGACCAGAAGCCCGCGCATCCCGGCAAAG
GGTGATGACGTCGTCCTTCAAGCGCT
>Rock_Hyax_Bidirectional_Promoter
(SEQ ID NO: 101)
AGGGTAAATCGGCGCTGCTCAGCATTTAAAAGAATCCCAAATGTGTCGCCATTTTACGCTTAGGGTGATATCCCA
CAAGACACAGCGACATGCAAATATCGTGAGTCTCTGTTTCCCTGTCCACGAGGGCGTCCTCTCGCTGGGGCGCAC
GCGCGGTGTGTGTGCCCCCGTTGTGTGTTCCCGCGATTCCAAAGAACTGGTTGATAACGTTAGACTTCCGGCTGC
>Sheep_H1_Bidirectional_Promoter
(SEQ ID NO: 102)
GGCGAACAATGCGCGCAAACAGCATTTATAATGAGCTCATACCTAAAGCCACTTTACGGTTACGGTGACTTCCCA
CAAGACATTGCGGCATGCAAATATTTTAGTGCGTCCCGCCCCTGGTAGTTCCACGCTAGGACGCACACGCACTAC
GGTTCCCGCCTTTAGACTGCGCTGGCGATTCCAGGAGCGGACTGATGACGTCAGCGTTGGGGCTCC
>Squirrel_H1_Bidirectional_Promoter
(SEQ ID NO: 103)
GAAAGGGACTCCGCACAAGCAGAGTTTATAAGGCTCCCATCTGTACAGCCATTTCTCGGTCATGGTAACTACCCA
CAACACACAGCGATATGCAAATATAGCAGAGCGTGTCTTCCCGCGCGCGCCTGGTCGTCTCGGCGCCGGCGCCGG
AACTGTGACAGAGACCCTGCGATTCCTGGGAGCTGGCTGATGACATCAGTGTCTAACCTCC
>Tarsier_H1_Bidirectional_Promoter
(SEQ ID NO: 104)
GCGAGAGGGTGGGTCCACACAGAGCTTATAAGGCTTCACAAGTAAAGATATTTCACGGTGACGGTGACTTCCCAC
AATACACTGCGACATGCAAATATAGCCGGGCGTGCCTCCCCGATCCCGGAAGAGCGACTCCTAGCCAGTGCGCAC
GCGCGCTGCGTGTTCGCGTCCTAGGTCGCTGGGCCCGCGGTTCCTGGGAGCGGGTGGTGACGTCAGCGGCCCAGC
TTC
>Two-Toed_Sloth_H1_Bidirectional_Promoter
(SEQ ID NO: 105)
AGAAAAAAATAGTTTATGCTGGATTTATAAGATTCCCAAATCTAAAGCCATTTCACAGTTACGGTGATTCCCCAC
TACACACGGCGATATGCAAATATAGCGGAAGTGTTCCTGAGGCGTGGTAAAGCGCGCGCGCGCTGAGAGTTCCCG
CCCTGTGGTGCTGGGCTGGAGATGCCTGAGAACTGGCTGATGACGGCAACGTTCGGGCTCC
>White_cheeked_gibbon_H1_Bidirectional_Promoter
(SEQ ID NO: 106)
GGGGAAAAGTAGTAGACCTTATAAGATTCCCAAACCCAAAGACATTTCTCGTTTATGGTGACTTCCCAGAAGACA
TAGCGACATGCAAATATTGCAGGGCGCCACTCCCCTGTCCCTCACAGCCATCTTCCTGCCAGGGCGCACGCGCGC
TGGGTGTTCCCGCCTAGTGACACTCGGCCCGCGATTCCTTGGAGCGGGTTGATGACGTCAGCGTTCGAATTCC
>GAR1-1_Bidirectional_Promoter_Homo_sapiens
(SEQ ID NO: 107)
CCTGCCCCGCCTCTGGGAGAGAAGGCGGATCCCTAACGCCAGCTATCTCCAAGAGCAACATTGCCGCAGCACTTC
CGGGACGTCGTGCTGCAAAGGACGCCGCTGTTATACGTCACTTCCACGGCTCAGCGTCAG
>GAR1-2_Bidirectional_Promoter_Homo_sapiens
(SEQ ID NO: 108)
CCTGCCCCGCCTCTGGGAGAGAAGGCGGATCCCTAACGCCAGCTATCTCCAAGAGCAACATTGCCGCAGCACTTC
CGGGACGTCGTGCTGCAAAGGACGCCGCTGTTATACGTCACTTCCACGGCTCAGCGTCAGGCAAGTTGGCCTCTC
TGTTGTAAATTAGTGGTTAAGGTTATCTATTATTGCCACTTTTCCAGCGCTAAAGGCTGTTTTGGAACCAGTGTT
GCTTGTTCCGCGGGTGATTGGCTTTTTTTTTTGGCAAACCAGTTATTCAAGTTTCTGGTCTTTAAAAAACTCTGT
GGCGGTACGGTAACCGAGGAGGTTCCAGCGCGGCGGAAGTACCCCGCGGGTGGGTGTGTGCGCAAGGCCAGGGCC
AGAGGGGCACGTGGCGCCG
>macaca_mulatta/1-143_Gar-1
(SEQ ID NO: 109)
CCCACCCCGCCTCTGGAAGAGAAGGCGGATCCCTAACGCCAGCTATCTCCAAGAGCAACATTGCCGCAGCACTTC
CGGGACGTCGTGCTGCGAAGGACGCAGCTATTATACGTCACTTCCACGGCGCGGCGTTAG
>ancestral_sequences9/1-143_Gar-1
(SEQ ID NO: 110)
CCTACCCCGCCTCTGGAAGAGAAGGCGGATCCCTAACGCCAGCTATCTCCAAGAGCAACATTGCCGCAGCACTTC
CGGGACGTCGTGCTGCGAAGGACGCAGCTATTATACGTCACTTCCACGGCGCGGCGTTAG
>papio_anubis/1-143_Gar-1
(SEQ ID NO: 111)
CCTACCCAGCCTCCGGAAGAGAAGGCGGATCCCTAACGCCAGCTATCTCCAAGAGCAACATTGCCGCACCACTTC
CGGGACGTCGTGCTGCGAAGGACGCAGTTATTATACGTCACTTCCACGGCGCGGCGTTAG
>ancestral_sequences10/1-143_Gar-1
(SEQ ID NO: 112)
CCTACCCAGCCTCCGGAAGAGAAGGCGGATCCCTAACGCCAGCTATCTCCAAGAGCAACATTGCCGCACCACTTC
CGGGACGTCGTGCTGCGAAGGACGCAGCTATTATACGTCACTTCCACGGCGCGGCGTTAG
>ancestral_sequences11/1-143_Gar-1
(SEQ ID NO: 113)
CCTGCCCCGCCTCTGGGAGAGAAGGCGGATCCCTAACGCCAGCTATCTCCAAGAGCAACATTGCCGCAGCACTTC
CGGGACGTCGTGCTGGGACGCCGCTATTATACGTCACTTCCACGGCTCCGCGTTAG
>callithrix_jacchus/1-143_Gar-1
(SEQ ID NO: 114)
CCCGCCCCGCCCCCGGTAGAGAGGGCGGATCTCTAACGCCAACTATCTCCAAGAGCAACATTGCCGCAGCACTTC
CGGGATGTCGTGCTGCGAAGGACGCCGCTATTGTACGTCACTTCCGCTTCTCCACTCTAG
>pan_paniscus/1-191_Gar-1
(SEQ ID NO: 115)
CCTGCCCCGCCTCTGGGAGAGAAGGCGGATCCCTAACGCCAGCTATCTCCAAGAGCAACATTGCCGCAGCACTTC
CGGGACGTCGTGCTGCAAAGGACGCCGCTGTTATACGTCACTTCCACAGCTCAGCGTCAG
>pan_troglodytes/1-191_Gar-1
(SEQ ID NO: 116)
CCTGCCCCGCCTCTGGGAGAGAAGGCGGATCCCTAACGCCAGCTATCTCCAAGAGCAACATTGCCGCAGCACTTC
CGGGACGTCGTGCTGCAAAGGACGCCGCTGTTATACGTCACTTCCACGGCTCCGCGTCAG
>pongo_abelii/1-191_Gar-1
(SEQ ID NO: 117)
CCTGCCCCGCCTCTGGGAGAGAAGGCGGATCCCTAACGCCAGCTATCTCCAAGAGCAACGTTGCCACAGCACTTC
CGGGACGTCGTGCTGCAAAAGACGCCGCTGTTATACGTCACTTCCACGGCTCAGCGTTAG
>nomascus_leucogenys/1-191_Gar-1
(SEQ ID NO: 118)
CCTGCCCCGCCTCTGGGAGAGAAGGCGGATCCCTAACTCCAGCTATCTCCAAGAGCAACATTGCCGCAGCACTTC
CGGGACGTAGTGCTGCAAAGGACGCCGCTGTTATACGTCACTTCCACGTCTCAGCGTTAG
>chlorocebus_sabaeus/1-191_Gar-1
(SEQ ID NO: 119)
CCTACCCCACCTCTGGAAGGGAAGGCGGATCCCTAACGCCAGCTATCTCCAAGAGCAACATTGCCGCAGCACTTC
CGGGACGTCGTGCTGGGACGCAGCTATTATACGTCACTTCCACGGCGCCGCGTTAG
>macaca_nemestrina/1-143_Gar-1
(SEQ ID NO: 110)
CCCACCCCGCCTCTGGAAGAGAAGGCGGATCCCTAACGCCAGCTATCTCCAAGAGCAACATTGCCGCAGCACTTC
CGGGACGTCGTGCTGCGAAGGACGCAGATATTATACGTCACTTCCACGGCGCGGCGTTAG
>colobus_angolensis_palliatus/1-143_Gar-1
(SEQ ID NO: 111)
CCTGCCCCGCCTCTGGGAGAGAAGGCGGATCCCTAACGCCAGCTATCTCCAAGAGCGACATTGCCTCAGCACTTC
CGGGACGTCGTACTGCAAAGGACGCAGTTATTATACGTCACTTCCACGGCGCCGCGTTAG
>piliocolobus_tephrosceles/1-143_Gar-1
(SEQ ID NO: 112)
CCTGCTCCGCCTCTGGGAGAGAAGGCGGATCCTTAACGCCAGCTATCTCCTAGAGCAACATTGCCTCAGCACTTC
CGGGACGTCGAGCTGCAAAGGACGCAGTTATTATACGTCACTTCCAGGGCGCCGCGTTAG
>rhinopithecus_bieti/1-143_Gar-1
(SEQ ID NO: 113)
CCTGCCCCGCCTCTGGGAGAGAAGGCGGATCCCTAACGCCAGCTATCTCCAAGAGCGACATTGCCTCAGCACTTC
CGGGACGTAGTGCTGCAAAGGACGCAGTTATTATACGTCACTTCCACGGCGCCGCGTTAG
>aotus_nancymaae/1-143_Gar-1
(SEQ ID NO: 114)
CCCGCCCCGCCCCTGGGACAGAGGGCGGATCTCTAACGCCAACTATCTCCAAGAGCAACATTGCCGCAGCACTTC
CGGGACGTCGTGCTGCAAAGGACGCCGCTATTATACGTCACTTCCGCGGCTCCAG
>cebus_capucinus/1-143_Gar-1
(SEQ ID NO: 115)
CCCGCCCCGCCCCTGGGAGAGAGGGCGGATCTCTAACGCCAACTGTCTCCAAGAGCAACATTGCCGCAGCACTTC
CGGGACGTCGTCCTGCAAAGGACGCCGCTATTATACGTCACTTCTGCTGCTCACTGTAG
>saimiri_boliviensis_boliviensis/1-143_Gar-1
(SEQ ID NO: 116)
CCCGCCCCGCCCCTGGGAGAGAGGGCGGATCTCTAACGCCAACTATCTCCAAGAGCAACATTTCAGCAGCACTTC
CAGGACGTCGCCCTGCAAAGGACGCCGCTATTATACGTCACTTCCGCTGCTCCACTCTGG
>carlito_syrichta/1-143_Gar-1
(SEQ ID NO: 117)
CCTGCCCCGCCTCTAGAGAAGGGGACGGATTCGTAATGCCCGGCAATCGCGCAGCCGCATTTCCGGGACGTCACG
AGGAAAGGGCGCCGAATTGTATGTCATTTCCGCTTTTCATGGCTGG
>otolemur_garnettii/1-143_Gar-1
(SEQ ID NO: 118)
CTCGGCCAGTCTCAGGCAGAAAGGGCGGAAACCGGACCCCAGCGCAATGTCACGGCAGCACTTCCGGTATGCTCC
GTTGCAAAAGACGCTGCTATTGTACGTCACTTCCGCCACCCGGCTGG
>prolemur_simus/1-143_Gar-1
(SEQ ID NO: 119)
CCCGCCCCGCCTCTCGGAGACGGGGCGCGTCCCTCCCGCCGCCGTCTCCCGGGGCAACATGGCGGCAGCACTTCC
GGGGCGCCGGTGGCGAAAGGCGCCGCTATTATACGTCACTTCCGCCGCCCGGCGCGAG
>propithecus_coquereli/1-143_Gar-1
(SEQ ID NO: 120)
CTGGCCCAGCCTCTTATGGCGGGGGCGGACCCCTTACGCCAGCTATCGCCCAGGGCAATATGGCGACATCACTTC
CGGTATGTCAGGTTGTGAAAGGCGCCGCTATTGTACGTCACTTCCGCTGCCCAGCGCGGG
>castor_canadensis/1-143_Gar-1
(SEQ ID NO: 121)
CACAACTCGCCTCTGAGAGAGGAGGCGGATCCCTAACGCCTGCTATCTCCAAGGGCAACACTGCGGCATACTTCC
GGAACGTCAGCTCGATGGGACGCGGTTATTTTACGTCACGTCCGCTACTCTCACTCGG
>calJac3_Gar-1
(SEQ ID NO: 122)
CCCGCCCCGCCCCCGGTAGAGAGGGCGGATCTCTAACGCCAACTATCTCCAAGAGCAACATTGCCGCAGCACTTC
CGGGATGTCGTGCTGCGAAGGACGCCGCTATTGTACGTCACTTCCGCTGCTCCACTCTAG
>otoGar3_Gar-1
(SEQ ID NO: 123)
CTCGGCGTCAGTCTCAGGCAGAAAGGGCGGAAACCGGACCCCAGCGCAATGTCACGGCAGCACTTCCGGTTATGC
TCCGTTGCAAAAGACGCTGCTATTGTACGTCACTTCCGCCACCCGGCTGG
>speTri2_Gar-1
(SEQ ID NO: 124)
ACGCCCGACGGGAGAGGAGGCGGGTCCCTAACTCCGCTATCTCCTAGGGCAACTCGACGGCAATACTTCCGGTAA
CGTCCTGACGTAATGGATGCCGTTTCGCTTTACTTCCGCTTTCTCTTG
>micOch1_Gar-1
(SEQ ID NO: 125)
ACGCCCCGCTGTCTCCAAGGGCAACGAGAGACCTCACTTCCTGAAACGTCTCGTACAGAGGGCGCTGCTATTCTA
TGTCACTTCCGCTCCCCGGG
>criGril_Gar-1
(SEQ ID NO: 126)
AAGCCTCACTATAGGACGGAAGGATCCAGACTCCCGCTGTCTCCAAGGGCAACGCGCTACCACACTTCCGGAAAC
GTCGCGTACGGAGGGCACTGCTATTTTGCGTCACTTCCGCTACCCCGGC
>mesAurl_Gar-1
(SEQ ID NO: 127)
ACGCCTCACTCTAGAACGGAAGACTCCAGACGCCCGCCGTCTCCAAGGGCAACGCGCGACCACACTTCCGGAAAC
GGCGCGTACGGAGGGCGCTTCTATTTTGCGTCACTTCCTCTCCTCCAGG
>mm10_Gar-1
(SEQ ID NO: 128)
ACGCCTCACTGTAGCACGGAAGGACTCAAACAACTCCGTTTCCAAGGGCAACGCGCCGCCACACTTCCGGAAACG
TCGCGTACGGAGGGCGCTGCGATTTTGCGTCACTTCCGCCACCTCTAG
>microcebus_murinus/1-191_Gar-1
(SEQ ID NO: 129)
GCGGCGCCAGCCTCTGGGAGAGGGGGCGGACCCTTACGCCAGCTGTCTCCAAGGGCAATATAGCGGCAGCACTTC
CGGTAGCGACAGGTTGTGAAAGACGCCGCTGTTGTACGTCACTTCCGCTGCCCAGAGCGAG
>cavia_porcellus/1-191_Gar-1
(SEQ ID NO: 130)
CGAGTTGCTTCGGGCCTACTAACATCATGCGGCGTTTCTGGAAGAGGAGCCCGCTTCCGGACGCCCGCCGTCTCC
AGGGGCAACACTTCCGTGAACGTCATGTGTAAGGGACGGGTTACGTCACTTCCTGTGCTCCTTGGCT
>marmota_marmota_marmota/1-191_Gar-1
(SEQ ID NO: 131)
CGCCCGACTTCTGGCAAGAGGAGGCGGGTCCCTAACTCCGCTATCTCCTAGGGCAACACGACGGCAATACTTCCG
GTAACGTCCTGACGTAATGGTTGCCGTTTCGCTTTACTTCCGCTTTCTCTTGCTAA
>sciurus_vulgaris/1-191_Gar-1
(SEQ ID NO: 132)
CGCCCAGCCTCCGGGAAGAGGAAGCAGCTCCCGAATACCGGCTATCTCCAAGGGCAACACCACTGCAATGCTTCC
GGAAACGTCATGGCGTAATGGACGCCGTTACAACTTCACTTCCGCTTCTCTCGCTAC
>mus_caroli/1-191_Gar-1
(SEQ ID NO: 133)
CACGCCTCAACAGCTGTTAGCACGGAAGGACCCAAACAACCCCGTCTCCAAGGGCAATGCGCCGCCACACTTCCG
GAAACGTCGCGTACGGAGGGCGCTGCGATTTTGCGTCACTTCCGCCACCTCTAGCG
>mus_musculus/1-191_Gar-1
(SEQ ID NO: 134)
CACGCCTCACCAGCTGTTAGCACGGAAGGACTCAAACAACTCCGTTTCCAAGGGCAACGCGCCGCCACACTTCCG
GAAACGTCGCGTACGGAGGGCGCTGCGATTTTGCGTCACTTCCGCCACCTCTAGCG
>mus_spretus/1-191_Gar-1
(SEQ ID NO: 135)
CACGCCTCACCAGCTGTTAGCACGGAAGGACTCAAACAACTCCGTCTCCAAGGGCAACGCGCCGCCACACTTCCG
GAAACGTCGCGTACGGAGGGCGCTGCGATTTTGCGTCACTTCCGCCACCTCTAGCG
>mus_pahari/1-191_Gar-1
(SEQ ID NO: 136)
CCCAAACAACCCCGTCTCCAAGGGCAACGCGTCGCCACACTTCCGGAAACGTCGCGTACGGAGGGCGCTGCGATT
TCGCGTCACTTCCGCCACCTCTAGCG
>oryctolagus_cuniculus/1-191_Gar-1
(SEQ ID NO: 137)
CAACCGTAAACCCCAGCAGAAAGAACAGGCGGAGCCCTAACACCAACCTTCTCCCGGAGACACGCCCCCTGCTGC
ACTTCCGGAATGTTCTGGGGCAAAGGGCGCCGCTATTATACGTCACTTCCGCCGCGGTTCTTTCG
>balaenoptera_musculus/1-191_Gar-1
(SEQ ID NO: 138)
CAGCCGAGCCGCTGGGAGAGGGGCGGTCCCTGACGCCAGCCATCGCCAAGGGCAACGCCGCGGGGCGGCACTTCC
TGCAACGTCACGCTGCCAAGGACGCCGCTATTGTACGTCACTTCCTCCGCTCTCCGTAG
>delphinapterus_leucas/1-191_Gar-1
(SEQ ID NO: 139)
CAAGCCGATCCGCTGGGAGAGGGGCGGTCCCTGACGCCAGCCATCGCCAAGGGCAACGCCGCGGGGAGGCACTTC
CTGCAACGTCACGCTGCAAAGGACGCCGCTATTGTACGTCACTTCCTCCACTTCCCGGAG
>monodon_monoceros/1-191_Gar-1
(SEQ ID NO: 140)
CAAGCCGATCCGCTGGGAGAGGGGCGGTCCCTGACGCCAGCCATCGCCAGGGGCAACGCCGCGGGGCGGCACTTC
CTGCAACGTCACGCTGCAAAGGACGCCGCTATTGTACGTCACTTCCTCCACTTCCCGGAA
>phocoena_sinus/1-191_Gar-1
(SEQ ID NO: 141)
CAAGCCGATCCGCTGGGAGAGGCGCGGTCCCTGACGCCAGCCATCGCCAAGGGCAACGCCGCGGGGCGGCACTTC
CTGCAACGTCACGCTGCAAAGGACGCCGCTATTGTACGTCACTTCCTCCGCTCTCCGTAG
>physeter_catodon/1-191_Gar-1
(SEQ ID NO: 142)
CAAACCGAGCCGCTACTAGAGGGGCGGTCCCTCACGCCAGCCATCGCCAAGGGCAACGCCGCGGGGCGGCACTTC
CTGCAACGTCACGGCGCAAAGGACGCCGCTATTGTACGTCACTTCCTCCGCTCTCCGTAG
>bos_grunniens/1-191_Gar-1
(SEQ ID NO: 143)
CTTGCTGGGCCGCGGGGAGAGGGGCGGACCCTGACGCCAGTCATCGCCAAGGGCAACGCCGCAGAGCGGAACTTC
CTGCAACGTCATGCTTCCAAGGACGCCGATATTGTGTGTCACTTCCTCTGCTCGCCGTAG
>capra_hircus/1-191_Gar-1
(SEQ ID NO: 144)
CTTGCCCGGCCGCGGGGAGAGGGGGGGGCCCTGACGCCAGTTATCTCCAAGGGCAACGCCGCAGAGCGGAACTTC
CTGCAACGTCATGCTTCAAAGGACGCTGATATTGTATGTCACTTCCTCTGCTCGCCGTAG
>ovis_aries/1-191_Gar-1
(SEQ ID NO: 145)
CTTCCCGGGCCGCGGGGAGAGGGGCGGGCCCTGACGCCAGTTATCTCCAAGGGCAACGCCGCAGAGCGGAACTTC
CTGCAACGTCATGCTTCAAAGGACGCTGATATTGTATGTCACTTCCTCTGCTGGCAGTAG
>ovis_aries_rambouillet/1-191_Gar-1
(SEQ ID NO: 146)
CTTGCCGGGCCGCGGGGAGAGGGGGGGGCCCTGACGCCAGTTATCTCCAAGGGCAACGCCGCAGAGCGGAACTTC
CTGCAACGTCATGCTTCAAAGGACGCTGATATTGTATGTCACTTCCTCTGCTGGCAGTAG
>cervus_hanglu_yarkandensis/1-191_Gar-1
(SEQ ID NO: 147)
CTGGCCGGGCGGCGGGCAGAGGGGGGGGCCCTGACGCCAGTCGTCGCCAAGGGCAACGCCGCAGAGCGGAACTTC
CTGCAACGTCATGCTTCAGAGGACGCCGATATTGTATGTCACTTCCTCTGCTCGCCATAG
>catagonus_wagneri/1-191_Gar-1
(SEQ ID NO: 148)
CCCGCCTGGCCACTGGGAGAGGGGCAGTCCCTGACGCCAGTCATCGCCAAAGGGCAACCCCGCGGGGTTCCTGCA
AGCAACGTCATGCCGCAAAGGACGCCGCTATTTTACGTCACTTCCTCTGCTCCCGTTAG
>sus_scrofa/1-191_Gar-1
(SEQ ID NO: 149)
CCCGCCTCGCCACTGGGAGAGGGGCGGTGCCTGATGCCAACCATCGCCAAGGGCAACCTCGCGGGGCAGAAGTTC
CGGCGAGTAACGTCATGCCGCAAAGGACGCCGCTATTTTACGTCACTTCCTCTGCTCCCATTAG
>camelus_dromedarius/1-191_Gar-1
(SEQ ID NO: 150)
CCCGCCGGGCTGCTGGGAGAGAGGCGGTCCCTGACGCCAGCCATCTCCAAGGGCAACCCCGCGGCGGCACTTCCT
GCAGCGCCCTAAGGTAAAAGACGCCGCTATTGTACGTCACTTCCTTTGCTCGCGGTAG
>equus_caballus/1-191_Gar-1
(SEQ ID NO: 151)
AACCCGGGCGCCGGGAGAGGGCGGACCCCTGACGCCGCCGTCACCAGGGCAACCCTGCGGGCACTTCCTGCAACG
TCGCGGCAAAGGACGCCGCTATTACACGTCACTTCCTCTGCTCGTCGGTAG
>canis_lupus_dingo/1191_Garl
(SEQ ID NO: 152)
CCGCCAGGTCCCCGGGAGAGGGGGGCGGAACTCTCACGCCAACCATCTCCCGGGGCAACAGCGCGGCCGCACTTC
CGGGAACTTCTCGACTCAACGGACGCCACTATTATACGTCATTTCCTCCGCTCCTCGTAG
>canis_lupus_familiaris/1-191_Gar-1
(SEQ ID NO: 153)
CCGCCAGGTCCCCGGGAGAGGGGGGCGGAACTCTCACGCCAACCATCTCCCGGGGCAACAGCGCGGCCGCACTTC
CGGCAACTTCTCGAGTCAACGGACGCCACTATTATACGTCATTTCCTCCGCTCCTCGTAG
>rn6_Gar-1
(SEQ ID NO: 154)
AGGCCTGACGATAGAGCCGAAGAACCCAAACCACCCCTGTCTCCAAGGGCAACGCGGCACCACACTTCCGGAAGC
GTCGAGTACGGAAGGCGCTGCTATTTTGCATCATTTCCGCCACCCCTAG
>hetGla2_Gar-1
(SEQ ID NO: 155)
CACGCCCCACTCCGGGAGAGGAGCCGGGTCTCAGACGCCTGCGGTCTCCAGGGGCAACACCGCACAACGCTTCCG
TAAACGTCATGTGCAAGGGACGTCGTTACGTCACTTCAGCGCGCCTTCCTGG
>cavPor3_Gar-1
(SEQ ID NO: 156)
CATGCGGCGTTTCGGAAGAGGAGCCCGCTTCCGGACGCCCGCCGTCTCCAGGGGCAACACTTCCGTGAACGTCAT
GTGTAAGGGACGGGTTACGTCACTTCCTGTGCTCCTTGG
>chiLan1_Gar-1
(SEQ ID NO: 157)
CATGCCCAATTCTGGAAGAGGAATCGCGTCCCTGACGCCTGTTATCTCCAGGGGCAACACTACGGCAATACTTCC
GTAAACGTCATATGTAAGGGACGCTAAACGTCACTTCCTGTACTCCTTGG
>octDeg1_Gar-1
(SEQ ID NO: 158)
CGTGCCTAACTCCGGAATTGGACCCGCGTTCCGGACACCGCTGTTTCCTGGGGCAACACTTCCGTAAACGTCATA
AGCAAGGGACGGCGACGTCACTTCCTGTGTTCCGCGG
>ochPri3_Gar-1
(SEQ ID NO: 159)
AAGGGCGAGCCCCGGGCTGACGGGCGGATCCCCAATGCCCTCCATCTCCCGGAGCAACTCGGCACTTCCGCAAAG
TTCCGCGGCCAAGGACGCCGCTTTTGTGCGTCACTTCCGCCGCTGGACGCGGG
>susScr3_Gar-1
(SEQ ID NO: 160)
CCCGCCTCGCCACTGGGAGAGGGGCGGTGCCTGATGCCAACCATCGCCAAGGGCAACCTCGCGGGGCAGAAGTTC
CGGCGAGTAACGGCATGCCGCAAAGGACGCCGCTATTTTACGTCACTTCCTCTGCTCCCATTAG
>vicPac2_Gar-1
(SEQ ID NO: 161)
CCCGCCGGGCTGCTGGGAGAGAGGCGGTCCCTGACGCCAGCCATCTCCAACGGCAACCCCGCGGCGGTACTTCCT
GCAGCGCCCTAAGGTAAAGGACGCCGCTGTTGTACGTCACTTCCTCTGCTCGCGGTAG
>camFerl_Gar-1
(SEQ ID NO: 162)
CCCGCCGGGCTGCTGGGAGAGAGGCGGTCCCTGACGCCAGCCATCTCCAAGGGCAACCCCGCGGCGGCACTTCCT
GCAGCGCCCTAAGGTAAAGGACGCCGCTATTGTACGTCACTTCCTCTACTCGCGGTAG
>turTru2_Gar-1
(SEQ ID NO: 163)
CAAGCCGATCCGCTGGGAGAGGGGCGGTCCCTGACGCCAGCCATTGCCAAGGGCAACGCCGCGGGGCGGCACTTC
CTGCAACGTCACGCTGCAAAGGACGCCGCTATTGTACGTCACTTCCTCCGCTCGCCGTAG
>orcOrcl_Gar-1
(SEQ ID NO: 164)
CAAGCCGATCCGCTGGGAGAGGGGCGGTCCCTGACGCCAGCCATCGCCAAGGGCAACGCCGCGGGGCGGCACTTC
CTGCAACGTCACGCTGCAAAGGACGCCGCTATTGTACGTCACTTCCTCCGCTCGCCGTAG
>panHodl_Gar-1
(SEQ ID NO: 165)
CTTGCCGGGCCGCGGGGAGAGGGCGGGCCCTGACGCTAGTTATCTCCAAGGGCAACGCCGCAGAGCGGAACTTCC
TGCAACGTCATGCTTCAAAGGACGCTGATATTGTACGTCACTTCCTCTGCTCGCAGTAG
>dasNov3_Gar-1
(SEQ ID NO: 166)
GCCGCCAGGGACTGGGAGGAACAGCCTAATTCCCAACACCTCCCGTTTCCTAGGGCAACAAAGCGGCGTCACTTC
CTGTAACGCCCTGACGCAAAGGACGTTGCCATCCTACGCCACTTCCGCTACTCTCCGGTAG
>jacJacl_Gar-1
(SEQ ID NO: 167)
CAGGGGGGAAGGGAACCCCGGCGCCAGCATCTCCCAGGGCAACGCGGCAAGCACTTCCGGGGGGAGTCTGGAGAC
GGAGACGCCGTTATTTTACGTCACTTCCGCTGTCGCTCT
>eleEdw1_Gar-1
(SEQ ID NO: 168)
TTTAGAAAAAAAATTGGACCACTAACGCCAGGCATCTCCAAGGGCAACAAAGCCGTCCCACTTCCTAACGTCATC
AGGAAAGGCACGCTGTGCTTACGTCATTTCCTTTGCTTGACGGCAG
>tupChil_Gar-1
(SEQ ID NO: 169)
GGGAGGGGCGGCGCCCGGGGCCAGCTGTCTCCCGGGGCAACCTCGCGGGGCGCTTCCGGCGACGCCATGCAGCCA
CGGACGCCGTGACGTCACTTCCGCCACGCAGCGCCGG
>ancestral_sequences4/1-143_Gar-1
(SEQ ID NO: 170)
CCTGCCCCGCCTCTGGGAGAGAAGGCGGATCCCTAACGCCAGCTATCTCCAAGAGCAACATTGCCGCAGCACTTC
CGGGACGTCGTGCTGCAAAGGACGCCGCTGTTATACGTCACTTCCACGGCTCAGCGTTAG
>ancestral_sequences7/1-143_Gar-1
(SEQ ID NO: 171)
CCTACCCCGCCTCTGGAAGAGAAGGCGGATCCCTAACGCCAGCTATCTCCAAGAGCAACATTGCCGCAGCACTTC
CGGGACGTCGTGCTGGGACGCAGCTATTATACGTCACTTCCACGGCGCCGCGTTAG
>ursus_thibetanus_thibetanus/1-191_Gar-1
(SEQ ID NO: 172)
CCGCCAGGTCCCCAGGAGGGGAGGAGGGGGTGTTCACTAACGCCAGCCATCTCCCAGGGCAACACCGCGGCGGCA
CTTCCTGCAACTTCTTGATTGAAAGGACGCCACCATTATACGTCATTTCCTACGGAGGCGTAG
>zalophus_californianus/1-191_Gar-1
(SEQ ID NO: 173)
CCGCCAGGCCTCCGGGAAAGGGGGCGGATCACTAATGCCAGCCATCTCCCAGGGCAACACCGCGGGGGCACTTCC
TGCAACTTCTTGATTCAAAGGACGCCACTATTATACGTCATTTCCTATGGAGGACTAG
>mandrillus_leucophaeus/1-143_Gar-1
(SEQ ID NO: 174)
CCCACCCCGCCTCTGGAAGAGAAGGCGGATCCCTAACGCCAGCTATCTCCAAGAGCAACATTGCCGCCGCACTTC
CGGGACGTCGTGCTGCGGAGGACGCAGCTATTATGCGTCACTTCCACGGCGCGGCGTTAG
>dipodomys_ordii/1-143_Gar-1
(SEQ ID NO: 175)
CCCGCTCCGCCTCCGGCAACAGCCATCTCCACCGGCGCCAACGCCGCGGCACTTCCGGGACGCCTCGGCGCGAAG
GACGCGGACCTTTGACGTCACTTCCGCCGCCCTCAGGAG
>chinchilla_lanigera/1-143_Gar-1
(SEQ ID NO: 176)
CATGCCCAATTCTTGGAAGAGGAATCGCGTCCCTGACGCCTGTTATCTCCAGGGGCAACACTACGGCAATACTTC
CGAAACGTCATATGTAAGGGACGCTAAACGTCACTTCCACTCCTTGGCG
>octodon_degus/1-143_Gar-1
(SEQ ID NO: 177)
CGTGCCTAACTCCGGGAATTGGACCCGCGTTCCGGACACCGCTGTTTCCTGGGGCAACACTTCCGTAAACGTCAT
AAGCAAGGGACGGCGACGTCACTTCCTGTGTTCCGCGGCG
>fukomys_damarensis/1-143_Gar-1
(SEQ ID NO: 178)
NNNNNNNNNNNCCCGGGAGAGGAGCCGGGTCCCAGACCTCTGCGGTCTCCAGGGGCAACGCCACGCAACACTTCC
GAAACGTCATGTGCGAGGGACGCTGTGCTCACTTCCGGTGGGCCACTG
>heterocephalus_glaber_female/1-143_Gar-1
(SEQ ID NO: 179)
CACGCCCCACTCCAGGGAGAGGAGCCGGGTCTCAGACGCCTGCGGTCTCCAGGGGCAACACCGCACAACGCTTCC
GAAACGTCATGTGCAAGGGACGTCGTTACGTCACTTCCGCGCCTTCCTG
>ictidomys_tridecemlineatus/1143_Garl
(SEQ ID NO: 180)
CACGCCCGACTTCTGGGAGAGGAGGCGGGTCCCTAACTCCGCTATCTCCTAGGGCAACTCGACGGCAATACTTCC
GGAACGTCCTGACGTAATGGATGCCGTTTCGCTTTACTTCCGCTTTCTCTTGCTAA
>spermophilus_dauricus/1-143_Gar-1
(SEQ ID NO: 181)
GCCCGACTTCTGGGAGAGGAGGCGGGTCCCTAACTCCGCTATCTCCTAGGGCAACACGTCGGCAATACTTCCGGA
ACGTCCTGACGTAATGGATGCCGTTTCGCTTTACTTCCGCTTTCTCTGGCTAA
>urocitellus_parryii/1-143_Gar-1
(SEQ ID NO: 182)
GCCCGACTTCTGGGAGAGGAGGCGGGTCGCTAACTCCGCTATCTCCTAGGGCAACACGACGGCAATACTTCCGGA
ACGTCCTGACGTAATGGACGCCGTTTCGCTTTACTTCCGCTTTCTCTTGCTAA
>jaculus_jaculus/1-143_Gar-1
(SEQ ID NO: 183)
NNNNNNNNNNCCCAGCGGGGGAAGGGAACCCCGGCGCCAGCATCTCCCAGGGCAACGCGGCAAGCACTTCCGGGG
GGAGTCTGGAGAAGACGCCGTTATTTTACGTCACTTCCGCTGTCGCTCTAG
>myotis_lucifugus/1-143_Gar-1
(SEQ ID NO: 184)
GAGAGAGCCGGTCTCCACCTCCGGGGATATCCCGGGGCAAAGCCGCGGTGACACTTCCGGAACGTCAGGATGCCA
CGGACGCGGCTGTTTTACGCCACTTCCTTGGCTTGTCGGAAG
>pteropus_vampyrus/1-143_Gar-1
(SEQ ID NO: 185)
GGAGAAGGGTGGGGCCTCACCCCAGACGTTTCCTAGGGCAACACCACGGCGGCACTTCCGGAACGTTGAGATGCA
ACGGACGCCGCTATTATACGTCACTTCCTCGGCTCGTCGATAG
>choloepus_hoffmanni/1-143_Gar-1
(SEQ ID NO: 186)
ACCGCTCGGGGCCTAAGAAAGATTCTTAACGCCAGTCACCTCCAAGAGAAACAGAGCAGTTGCTCTTCCTGAACG
CCACGACGCAAAGGGCGTTGCCATTGTACGTCACTTCCTCAACTCTCTGGCAG
>dasypus_novemcinctus/1-143_Gar-1
(SEQ ID NO: 187)
GCCGCCAGGGAGCTGGGAGGAAAGCCTAATTCCCAACACCTCCCGTTTCCTAGGGCAACAAAGCGGCGTCACTTC
CTGAACGCCCTGACGCAAAGGACGTTGCCATCCTACGCCACTTCCGCTACTCTCCGGTAG
>procavia_capensis/1-143_Gar-1
(SEQ ID NO: 188)
TTCTCCAGGCTCCTGGATGAAGGGGCGGATCCTTAACGCCAACCATCTCCAACGGCAACAACGCAGGGGCACTTC
CTTTACGACAGGACGCAACGGAAGCTCTTGGCGTACGTCACTTCTGCTTGTCAG
>equCab2_Gar-1
(SEQ ID NO: 189)
CCCGGGCGCCGGAGAGGGCGGGACCCCTGACGCCGCCGTCACCAAGGGCAACCCTGCGGGCACTTCCTGCAAACG
TCGCGCCAAAGGACGCCGCTATTACACGTCACTTCCTCTGCTCGTCGGTAG
>cerSiml_Gar-1
(SEQ ID NO: 190)
CCCCCGGGCCGCCGGGAGGGGGTAGACCCCCGACGCCGGCCGTCACCAGGGCAACAGCGCGCGGCACTTCCTGCA
ACGCCGCGAGGCAGAGGACGCCGCCATTATACGTCACTTCCTCTGTTCGTCGGGAG
>felCat8_Gar-1
(SEQ ID NO: 191)
CCGCCGGACCCCCGGGAGAGGGAGCGGATCACCAACGCCAACCGTCTCCCAGGGCAACACCGAGGCGGCACTTCC
GGCAAGGTCTGGATTCAAAGGACGCCACCATTATACGTCATTTCCTCTGCTCCTCAGTAG
>mus_Furl_Gar-1
(SEQ ID NO: 192)
CCCGCAGGCTCCCGGGAGAGGGGGCGGATCACTAACGCCAGCCATCTCCCAGGGCAACAGCCTGATGGCACTTCC
TGCAGCTTCTTTGCAGTCAAAGGACGCCACTATTAAACGTCACTTCCTACGTAGGTGAAG
>ailMell_Gar-1
(SEQ ID NO: 193)
CCGCCAGGTCCCCAGGAGGGGAGGAGGGGGAGTTCACTAACGCCAGCCATCTCCCAGGGCAACACTGCGGCGGCA
CTTCCTGCAACTTCTTGATTGAAAGGACGCCACCATTATACGTCATTTCCTACGGAGGCGTAG
>odoRosDivl_Gar-1
(SEQ ID NO: 194)
CCGCCAGGCTTCCGGGAAAGGGGGCGGATCACTAACGCCAGCCATCTCCCAGGGCAACACCGCGGGGGCACTTCC
GGCAACTTCTTGATTCAAAGGACGCCACTATTATACGTCATTTCCTATGGAGGACTAG
>lepWed1_Gar-1
(SEQ ID NO: 195)
CCGCCAGGCCTCCGGGAAAGGGGGCGGATCACTAACGCCAGCCATCTCCCAGGGCAACACCGCGGCGGCACTTCC
TGCAACTTCTTAGATTCAAAGGACGCCACTATTATACGTCATTTCCTACGGAGGACTAG
>pteAlel_Gar-1
(SEQ ID NO: 196)
CCTGCAGGGCTGCTAGGAGAAGGGCGGGGCCTCACCCCAGACGTTTCCTAGGGCAACACCACGGCGGCACTTCCG
GCAACGTTGAGATGCAACGGACGCCGCTATTATACGTCACTTCCTCGGCTCGTCGATAG
>pteVaml_Gar-1
(SEQ ID NO: 197)
CCTGAAGGTCTGCTAGGAGAAGGGTGGGGCCTCACCCCAGACGTTTCCTAGGGCAACACCACGGCGGCACTTCCG
GCAACGTTGAGATGCAACGGACGCCGCTATTATACGTCACTTCCTCGGCTCGTCGATAG
>eptFus1_Gar-1
(SEQ ID NO: 198)
CCCACGAGCGGCTGGAAGAGGGCCGGTCTCCACCTCCTCCCTCCCGGGACATCCCGGGGCAACACCGCGGTGACA
CTTCCTGGAACGTCAGGATGCCACGGACGCGACTATTTGACGCCACTTCCTTGGCTTGTCGGAAG
>myoLuc2_Gar-1
(SEQ ID NO: 199)
CCGACCGGCGGCCAGGAGAGAGCCGGTCTCCACCTCCGGGGATATCCCGGGGCAAAGCCGCGGTGACACTTCCTG
GAACGTCAGGATGCCACGGACGCGGCTGTTTTACGCCACTTCCTTGGCTTGTCGGAAG
>loxAfr3_Gar-1
(SEQ ID NO: 200)
CCCTCCTGGCTCCCGGGAGAGGTGGCAGAGCCCTAACGCCATCCATCTCCAAGGGCAACAGCGCAGCGGCACTTC
CTTTAACGTCATGATGCAAAGGACGCTACCTACGTCACTTCCTCTGCCCGTCGTCAG
>triMan1_Gar-1
(SEQ ID NO: 201)
TCCTCCTGGCTCCTAGAAGAGGGGGCGGATCCCTAACGCCAGCCATCTCCAAGGGCAACAACGCGCCGGCACTTC
CTGTAATGATGCAAAGGACGCTGCTGCCGTACGTCACTTCCTTGACTCGTCGGTAG
>chrAsil_Gar-1
(SEQ ID NO: 202)
ACCTCCGGGCCTCTGGGAGAGGGGAGGATTCCTAACGCAGGTCGTTTCCAAGGGTAACAACGCAGCGGCACTTCC
TTCAACGTGTGGACGCAACGGACGCTGCACGTCACTTCCGCTGCCTGTCCGTTG
>oryAfel_Gar-1
(SEQ ID NO: 203)
TCCTTCAGGCTGTTGGGCGTGGGGGCGGATCCCTAACGCCAGCCATCTCCAAGGGTAACAACGTGTGGGCACTTC
CACACGTCATGATGCAAAGGCCATTACTATTGTACGTCACTTCCTCTGCTTGTCGGTAA
>mouse_7sk-1
(SEQ ID NO: 204)
GAGAGTAAGCAGGCTCTTGGTAGGTATATAAGGCCATAGAATTTTGTAACTTTACACATGTGGTGACCTTATGTA
GCCGACTGTACTTGATATTATAACAAATCCTGAATCCGTTTTAGGGTTAAATAATCCTTTTTATACTCGCTTCGT
TCTAAGTTTAAATTAAAATACTTAAATTTAGGATGTTTTTACTGTTAACCAAAATGCTTTGGGGCTATGCAAAAT
ACAACAGTTTGGATTGGTTAAACCTTCCGAAGCCCCGCCCCCGACGGCCATGTCT
>CD2AP_Bidirectional_Promoter
(SEQ ID NO: 205)
AGCGAGCCCAAGCTCCTCTGCACCGCTTCCTCATCCGCTCGCTGCACCTGGACGCGGTCGGCGCGCGACCCCCGG
CCGTGACGTCACCGCACCTGGCAGCAGCCGTGGGGACCGGGAGAGAGCCCGAACGCGACGGGGGGGGGTGGGGCG
GGGAGAACGAGGGCGTTCTCGCGAGATTTGCCTCCTCCCGGTCCCAGCTCCCCGCACCTTCTCGGCCTCTGTCTG
GGTCCCCACCTTAGTCTACGGTGTCGCCTTTTCTAACTGCGAGTGCTAAGGAAGAGGCGAGGGGGGGGCTCCGAG
GCTAGGCGGGCGCTCGGGGTTGGAGCCGAGGGTCTGGGCAAACCGGTGGGTCCCTCCCCACTGCGGGAGCGGCCA
GGGTGGGAAAACCGCGGTCGGGCGGGGGGGGTAGGGCCCTCCCGCCGCCGTGGCTCCTGGGGAGGCCAGGGGTGA
GGAGCTGTCGCCGCCTTTGCCTCTGCCTCGAGGGCCGCGCTGAAGAGACTGGTAGGAGAGCGCCGCGGGCGGATG
GAGGCGACTCTTCGCCCCGCCTGAGCTCAGGAGGGGCTAGCGCGGAGCGCGGGTCCCGCCTCCAGCCGCGGGAGC
GGCCGCGCGAGCCACCACTGGAGGAGGAGGAGGAGGAGCGGACGTCGGCTTCTCCCCGCGGGAGCCCCCAGC
>DCTN6_Bidirectional_Promoter
(SEQ ID NO: 206)
ACGCGACGCAAACAAGAGTCGCAAGCTTCCGGGTCCCCGCCCCACCCCGGCTCCGCCCCTCCCCCAACCCTGCCA
GGCTCTCCAATCGCATGTGGAATTATCGCTCTACCCAGGCGGTGGTGTCGATCTACGTTCCAATTGGGGCCGTAC
C
>EMBP1_Bidirectional_Promoter
(SEQ ID NO: 207)
AAAACCTTACACCTGCGCAAAAATAAGCCTCCCTCATAAGAAAGCCCAAAGATGTCCGGGGTCGGGGAGGAGGAA
AGTGTCTCTCATCTGTCCCATCAACGAAAATTAGTGAAATCTGCCTCAGATGAAGTGCAAAGGCCAGTCTGCAGG
GATAGTTTCAACCTCTCCCCACGCGATGGGCTACACATCACCTGCCCAAGCTCTCTCCCGACCTGCTAGAGCCTA
GAGGGCGGAGGCCGGAGAGGCTGCAGCCGGGAGTAGCACCGCACATCCGGGAACGCC
>EP400NL_Bidirectional_Promoter
(SEQ ID NO: 208)
ACCCGTCTACAGTGGACACGACGAAACCAGGGACATGTCCCACCATTTCAGTGGTCACAGGCAAGAGTCTTGTGG
ATCTTCGGATCCCACGTAACATCTCATCTCCCTAGGCACCCCGACTCCCCTGCCCAATTTAAAACAGACCTCAGC
CTGCCCCATCCCGGCTGCTTTGCCTGGTGCTCTTCTAACTGCATGTTTATCTATCCTCCCCGCCTAGACTGTAGG
GCCCGCGAGGGGAGCCGCTAGCTGTGCTTGTCAGTGTGACCAGCGCTCAGCAGGTGTCCGGCGGGAGGGCGGGCA
AATACAACTCAGTGCCCACGTGCGAATGAATGAACAAACTAGTTCCGGGCGGAGCCAGAGGCGCGCGCCGGCGCG
GACCGAGGCCCGGCCCTATCCGCCCCGCCCCCTCCGCCCCGCCCCCTCCGCCACGTCCCTCCGGGTCCGCTGGGC
GCTGATTGGTCCGAGCCTCGCCTGCGCAGTGCCGGGCCGGCTCCCGCGCTTGC
>FCHO21_Bidirectional_Promoter
(SEQ ID NO: 209)
CCGACTCCACTGCCGCTGGCTGGCCCTTCTCTTCCCTCTGTCCCTGGGCCAGTGCCCGTCGCACCACAAACAGTG
CGAGCAGTCTCCCCGGTGACTCCTCAAGGACCCAGTTCTCCACCATTCCTAAGAGAACACTCAACCCAGCCGCGC
CCGGGATGCAGAGAGATCTACCAACACCCGAGAATGGGGACAGGGCGCATGCGCACACCGTGGCCGTGGCGTCTA
AGTGCTCGCCCAGCTGCGGCAGCCGCTAGGTGGCGCATGCGCCCTGGAAGGTGCGGGCCGGTCTCTGGGAAGAAG
GCGGCGGCGGCGAAAGGCGGGGGTGCTGTGGGGGCCGGGCCGTGTTT
>FCHO22_Bidirectional_Promoter
(SEQ ID NO: 210)
CCGACTCCACTGCCGCTGGCTGGCCCTTCTCTTCCCTCTGTCCCTGGGCCAGTGCCCGTCGCACCACAAACAGTG
CGAGCAGTCTCCCCGGTGACTCCTCAAGGACCCAGTTCTCCACCATTCCTAAGAGAACACTCAACCCAGCCGCGC
CCGGGATGCAGAGAGATCTACCAACACCCGAGAATGGGGACAGGGCGCATGCGCACACCGTGGCCGTGGCGTCTA
AGTGCTCGCCCAGCTGCGGCAGCCGCTAGGTGGCGCATGCGCCCTGGAAGGTGCGGGCCGGTCTCTGGGAAGAAG
GCGGCGGCGGCGAAAGGCGGGGGTGCTGTGGGGGCCGGGCCGTGTTTACACAGCGGCGGGCGGGCGCGGACGCGG
AACCCGGCGCGGCGGCGGCACG
>KMT5C1_Bidirectional_Promoter
(SEQ ID NO: 211)
CGCGGGGGGGGAGGGGAGAGGGATGGCGGTGCGCGCGCATTCACCGCCTCCCTCCCGCCGGGTCTGGCTTTCTCC
CTCCTGTGGCCGAAGCTTTCCTCGGAGAAATAGAAGAGGGAGGCCGCGACTCTATGGTGATGGACGGAGGCCTTA
CCCAATGGAAAGAGGAGCTGTCCCAAGGCCAGGCAATCATATACGACTACTGGAGCTGGCAGAGCCCGCCCTCTT
TCCACTTGGACCTGAATAACCCGACCCAAACCGAGTTTCGCCCGGAGAGACTGCGCTTTCGGCCAATGAGTGCGT
CGATTTCGAGCCCCAGTGTGAGCGAAGGCGGGACAAGTCTCCATGGCAGCGACTAAAGGACAGCGATGTGAACCA
CTGACAACAGTTCGCGGCGTTTGACGGCGGCGGGGGCGTGGCGGGGTTTTATCTGTGTATTGACGAGAGCCGGGC
GCGGAGGGAAAGAGTGGGGCTTGGCCAATGGGAGCGCCGTGAGCTTCGTAGCAACGGAGGAGTGGCGGTGGCTGT
GGCCAATAGAAAGCCTCAGTGGCCTTGGCGGGGCTGGCCCGGAG
>KMT5C2_Bidirectional_Promoter
(SEQ ID NO: 212)
CGCGGGGGGGGAGGGGAGAGGGATGGCGGTGCGCGCGCATTCACCGCCTCCCTCCCGCCGGGTCTGGCTTTCTCC
CTCCTGTGGCCGAAGCTTTCCTCGGAGAAATAGAAGAGGGAGGCCGCGACTCTATGGTGATGGACGGAGGCCTTA
CCCAATGGAAAGAGGAGCTGTCCCAAGGCCAGGCAATCATATACGACTACTGGAGCTGGCAGAGCCCGCCCTCTT
TCCACTTGGACCTGAATAACCCGACCCAAACCGAGTTTCGCCCGGAGAGACTGCGCTTTCGGCCAATGAGTGCGT
CGATTTCGAGCCCCAGTGTGAGCGAAGGCGGGACAAGTCTCCATGGCAGCGACTAAAGGACAGCGATGTGAACCA
CTGACAACAGTTCGCGGCGTTTGACGGCGGCGGGGGCGTGGCGGGGTTTTATCTGTGTATTGACGAGAGCCGGGC
GCGGAGGGAAAGAGTGGGGCTTGGCCAATGGGAGCGCCGTGAGCTTCGTAGCAACGGAGGAGTGGCGGTGGCTGT
GGCCAATAGAAAGCCTCAGTGGCCTTGGCGGGGCTGGCCCGGAGAGCAGATGGGAGGTGCGGCGACAGTGTTTGA
CGAGAGCCGAAGGAGGCTGTGGGAGGTGTTGGCGGCGGCGGCGCGGGCGCCTGAGGAGGAGGAGGAGAAGCGGGT
GAGGGGCGGCGCGGGGCCCGATCTCTGAGCCCCTTCACGGCCCCAGCCCCGCGCCGCCTTGGCTCCCCAGTCGCC
CCCTGCCCCGACTGCCCCCCACCCCGCCCGGCCCCTCCTCGTGTCCAGGCGCCCAC
>LZTR11_Bidirectional_Promoter
(SEQ ID NO: 213)
TGAAGGAGCTGAGGCCCTGCTAAGTAGGAATGAGAATCCAGAGGCTCCTCGCCGGGCTGCCTCTCAGTCAGTAAG
AAAGCCAAGGGGAGAGGGGAGTTGCTGGGGGTCAGGGCTGAGGGCGCTAGCAGGAAAGGGAGCGTTGAGCCGCCT
GCAGAGGCCGCTGCGAGCCCGGAACCCTCCATGGGGGATCCCGGCAGCGGCAGACGATCCAGGCCGGAGCCACGC
GCAGACCCAGGGCATGCCGGGAACTGCGAGCCGGCCGCGGGTCTTCGGGCTGCGTGGGCCTGGGAGGCGCCGGGA
AGAGCAGTCGCGACGGGGCTAGGGACGACACACTGCATTCACTGGAAGGGACAACGCAGCGCCAGTACATAGCCT
GAAACGCTCCCCAGAAGGTCCCACGCTCGCCGCGCGGTCGACAACCGCATCCTGCGCTCGCCCGCGGTGTCTCGG
CAAGCGGTAGGCTTGTCGGGAAGAGCTGGAGGGCGCAAGTGCGGCGCTGGCCGGACGTGCCGC
>LZTR12_Bidirectional_Promoter
(SEQ ID NO: 214)
TGAAGGAGCTGAGGCCCTGCTAAGTAGGAATGAGAATCCAGAGGCTCCTCGCCGGGCTGCCTCTCAGTCAGTAAG
AAAGCCAAGGGGAGAGGGGAGTTGCTGGGGGTCAGGGCTGAGGGCGCTAGCAGGAAAGGGAGCGTTGAGCCGCCT
GCAGAGGCCGCTGCGAGCCCGGAACCCTCCATGGGGGATCCCGGCAGCGGCAGACGATCCAGGCCGGAGCCACGC
GCAGACCCAGGGCATGCCGGGAACTGCGAGCCGGCCGCGGGTCTTCGGGCTGCGTGGGCCTGGGAGGCGCCGGGA
AGAGCAGTCGCGACGGGGCTAGGGACGACACACTGCATTCACTGGAAGGGACAACGCAGCGCCAGTACATAGCCT
GAAACGCTCCCCAGAAGGTCCCACGCTCGCCGCGCGGTCGACAACCGCATCCTGCGCTCGCCCGCGGTGTCTCGG
CAAGCGGTAGGCTTGTCGGGAAGAGCTGGAGGGCGCAAGTGCGGCGCTGGCCGGACGTGCCGCACCGTCAGCGCA
GGGCTCGCCGGGAAATGTGGTTTCTCCAGCCGGCCCGGGGCGGTGGCCGCAAGTTGGGCTTACAGCGCGGCCGAT
CCGGCGTGGACCCGGG
>PATJ1_Bidirectional_Promoter
(SEQ ID NO: 215)
GAGTCGGGGCGAGGGGAGGGCCTGCCAGGTGAGGCGCGGTC
>PATJ2_Bidirectional_Promoter
(SEQ ID NO: 216)
GAGTCGGGGCGAGGGGAGGGCCTGCCAGGTGAGGCGCGGTCACCCTGGGCCTCTCACTTCCGCCCAGGTGAGGCA
GGGCCGACACCGAGCCCGCCCGACCCGGGCTCCCACCTGCTCCTCCAGCGCACCAG
>PCNX11_Bidirectional_Promoter
(SEQ ID NO: 217)
TTCACAAATATCATAAATGACAGGCAGGACGCTTTTCTGGAGTCAAGATCTGTTAGTTTCGGAGTCAGAAAGACC
CCGTTTAGAGACTCGTAGGCGAACTTGCCAGGGGGCCTACCAGGGGCAGAATGGGGTCCTCCGGACCAGCCAGCC
GCGTCTCAGCCACCTCCGCAGCCCCCGGGGCCCTGAACCCCGGCCGCGTTGACGCGCGCTTCTCCCGGACGTCGG
CAGGAGGCGCCCGCGGCGGACCAGGCGCGGCGCGCACCGTAGCCGGCCCAGGGGGGGGAGGGAGCGGA
>PCNX12_Bidirectional_Promoter
(SEQ ID NO: 218)
TTCACAAATATCATAAATGACAGGCAGGACGCTTTTCTGGAGTCAAGATCTGTTAGTTTCGGAGTCAGAAAGACC
CCGTTTAGAGACTCGTAGGCGAACTTGCCAGGGGGCCTACCAGGGGCAGAATGGGGTCCTCCGGACCAGCCAGCC
GCGTCTCAGCCACCTCCGCAGCCCCCGGGGCCCTGAACCCCGGCCGCGTTGACGCGCGCTTCTCCCGGACGTCGG
CAGGAGGCGCCCGCGGCGGACCAGGCGCGGCGCGCACCGTAGCCGGCCCAGGGGGGGGAGGGAGCGGAGAGGAGG
AGCTGGAGGGGGCGCGGCTTCCTCTCGGTCG
>PCNX13_Bidirectional_Promoter
(SEQ ID NO: 219)
TTCACAAATATCATAAATGACAGGCAGGACGCTTTTCTGGAGTCAAGATCTGTTAGTTTCGGAGTCAGAAAGACC
CCGTTTAGAGACTCGTAGGCGAACTTGCCAGGGGGCCTACCAGGGGCAGAATGGGGTCCTCCGGACCAGCCAGCC
GCGTCTCAGCCACCTCCGCAGCCCCCGGGGCCCTGAACCCCGGCCGCGTTGACGCGCGCTTCTCCCGGACGTCGG
CAGGAGGCGCCCGCGGCGGACCAGGCGCGGCGCGCACCGTAGCCGGCCCAGGGGGGGGAGGGAGCGGAGAGGAGG
AGCTGGAGGGGGCGCGGCTTCCTCTCGGTCGCTCCCTGGCGCCGGGCCTCTTTCTCTGCCTGGCCCAGGGCTGGC
GGCCGGCGGGGGTCGCGGCGGCGGCAGTGGGGGCGCTGGCGGGCCGCGGGTGGCGGGGGCCGGGCCGCGGCTCCG
GGTGTTAGGAGACAAGATGGCGGCGGCTCTCAGAAGGCCGGTCTCCTCCTCTCCGCCGTCCTCCGCCCCGCCGCT
CGCCGCCTCCTCCTCTCGGGTCTCCTCCTCCTCGTTTGCTGCCTCCTCCTCCTCCTGCAGCAGCACCAGCGACCG
CCGAAGCGCCGGCTCGCTCACCCGGAGCTCCGGAGGTGGATAGACGGGGCAGCTGCAGGCTCCGGCGACCGAGGC
CGAGCTGGGGCCGGGGGGGGACGGCGGCGGCGGCGGCGGCGACGGCGGCGGCGCCGGGTGGGG
>PTGERN_Bidirectional_Promoter
(SEQ ID NO: 220)
AATTTTTGGCATAGGCCAAGCGGCTGGTTGGTGGGGTGTTTAGCTCAGGACGAGAGGCCGAACGAGCGGGGAGTT
GGCTGAGGATAGACTAGACACGCGTGGGTGACTCCAGCGTGATGGAACGCGGGGTGTCCCGGGATAGGGCTAAAG
CGATGGGATTTCCAGACGAGTCTTTCCCAGGCCAACTTTTAAAGGTCGGAGGAAAGTTTCTCGTGGGGTGGGGGC
CCAGAGGGGATGGCAGGGTGGGCTCCGACGCCTCCTCGCCTTTAAGCGGGTGGCCCCGGCTCTTCCTCCGTTACC
TGGAGCGGGGGGGGCTTGGGAAAGTTTGTGTTTGTTGCTGGCAAAGCGCCGGATGGGAGGCGCGGGCGGGCGCT
GCGGTTCTTCCCTTCT
>RMRP_Bidirectional_Promoter
(SEQ ID NO: 221)
ACGTCCTCAGCTTCACAGAGTAGTATTTTATAGCCCTAAAGAAATTGTGTTTTATGATTAGGGTGAGAAAGTTGG
TGGCGTGAGATTAAAAAAACCGTTTTCGGGCATAACTTTCTAAGACTATAGGCTTTCAGAGGCATTGTGGCTAGC
AGAATAGCTAATAGACACGAAATGAACAAATACAGGAAAGCTAGAATGACACTATCTTATGCAAATATGGTCTGG
CCCCGCCCTACGGGGAGTGGGCGTGGCCTCCCCGGAGCCGGCCGGCCTGCTCGCGTGCGCGTGCGCGTTGGGGCG
GCCGGCCAATGCCGGACCGCTTCGGCACCGCCCGCCCGATCCCTCCACCCGTGGGCCGGCA
>RNF1871_Bidirectional_Promoter
(SEQ ID NO: 222)
CCAGGACCTTGCAGGTGGAGAGCATAGTTGCCAAAATCAAGGCGGAGGAGCGCACCGCCGCTAGGATCCAGGCGG
AGAAGCCCACCGCGGCCAGGACCTAAGGATGCAGTACACTGCTGCCAGGATCTTGTCTGTGGAGCGCAGCGCGGC
CAGGACCTCCGGCTGCAGCACACCGCTGCCAGGATCTTATCGGCAGAGCGCTCCGCGGTCCGGACCCCGCCCCGT
GCGCGTCCCCGACCCCGCCCC
>RNF1872_Bidirectional_Promoter
(SEQ ID NO: 223)
CCAGGACCTTGCAGGTGGAGAGCATAGTTGCCAAAATCAAGGCGGAGGAGCGCACCGCCGCTAGGATCCAGGCGG
AGAAGCCCACCGCGGCCAGGACCTAAGGATGCAGTACACTGCTGCCAGGATCTTGTCTGTGGAGCGCAGCGCGGC
CAGGACCTCCGGCTGCAGCACACCGCTGCCAGGATCTTATCGGCAGAGCGCTCCGCGGTCCGGACCCCGCCCCGT
GCGCGTCCCCGACCCCGCCCCGTGCGCGTCCCCGGCGTTGGCGTCTTCGTCCTGTTGCTGGTCTCCGTCCGGTCG
CCGGCCGTCTAGGTCTCCGGCCCTCCCCAGCCGCTCCTGCGCCCTTGCCGGCCCCGCCGCCCGCAGC
>SAMD4B1_Bidirectional_Promoter
(SEQ ID NO: 224)
CGCCCACTGAGGACAGCCTTGGGTGAGGCGGGCCACCCAAGGGGGGGGGAAGAGGAGGCCTGGAACGCCTGAATC
AGGAACTGTGACTTCGCTCGGGGCAGCTGGGGTGGACGCGCGCGAGCCTGCCCCCTGCGGGCCTGGAGGCCCAAC
CTCAGACTCCGCCGGGCCCGTTGCCCTGGGCAACGCCCCGCGCGCCCCGCCCCTTCCCCGCCCCCCAGCCCCAAA
CCCCAGGCCTGGCCGACTGCCCGTCACCCCCACGTCCGACCAATCCCGCCGAGGAGGGGGCGGGCCTCTTGGGCC
CCGTTCCACCACCGTCGCTCCCCCCTCGCCGCGACCCCGCCTTACTCGGCTCACACCTCCCGCCCTTCGGGCTGC
CCTCGCCGCCCGTTGGCTGGCGCGCCGTTCGTCACCCGGGCGTGAGCTAATGCCGGCGCGCGGCGGCCCCCGTCG
GGGCGGGGCCAGGGGCGGTGACGCACGGCGCGGTGACGCAGCGCGACGGCGGCGGCGGCGGC
>SAMD4B2_Bidirectional_Promoter
(SEQ ID NO: 225)
CGCCCACTGAGGACAGCCTTGGGTGAGGCGGGCCACCCAAGGGGGGGGAAGAGGAGGCCTGGAACGCCTGAATC
AGGAACTGTGACTTCGCTCGGGGCAGCTGGGGTGGACGCGCGCGAGCCTGCCCCCTGCGGGCCTGGAGGCCCAAC
CTCAGACTCCGCCGGGCCCGTTGCCCTGGGCAACGCCCCGCGCGCCCCGCCCCTTCCCCGCCCCCCAGCCCCAAA
CCCCAGGCCTGGCCGACTGCCCGTCACCCCCACGTCCGACCAATCCCGCCGAGGAGGGGGCGGGCCTCTTGGGCC
CCGTTCCACCACCGTCGCTCCCCCCTCGCCGCGACCCCGCCTTACTCGGCTCACACCTCCCGCCCTTCGGGCTGC
CCTCGCCGCCCGTTGGCTGGCGCGCCGTTCGTCACCCGGGCGTGAGCTAATGCCGGCGCGCGGCGGCCCCCGTCG
GGGCGGGGCCAGGGGCGGTGACGCACGGCGCGGTGACGCAGCGCGACGGCGGCGGCGGCGGCGGCGGCGGTGGTC
GGTGCGGGAGGAGGGAGGGGAGCTTGCGGGCCCGAGA
>SAMD4B3_Bidirectional_Promoter
(SEQ ID NO: 226)
CGCCCACTGAGGACAGCCTTGGGTGAGGCGGGCCACCCAAGGGGGGGGGAAGAGGAGGCCTGGAACGCCTGAATC
AGGAACTGTGACTTCGCTCGGGGCAGCTGGGGTGGACGCGCGCGAGCCTGCCCCCTGCGGGCCTGGAGGCCCAAC
CTCAGACTCCGCCGGGCCCGTTGCCCTGGGCAACGCCCCGCGCGCCCCGCCCCTTCCCCGCCCCCCAGCCCCAAA
CCCCAGGCCTGGCCGACTGCCCGTCACCCCCACGTCCGACCAATCCCGCCGAGGAGGGGGCGGGCCTCTTGGGCC
CCGTTCCACCACCGTCGCTCCCCCCTCGCCGCGACCCCGCCTTACTCGGCTCACACCTCCCGCCCTTCGGGCTGC
CCTCGCCGCCCGTTGGCTGGCGCGCCGTTCGTCACCCGGGCGTGAGCTAATGCCGGCGCGCGGCGGCCCCCGTCG
GGGCGGGGCCAGGGGCGGTGACGCACGGCGCGGTGACGCAGCGCGACGGCGGCGGCGGCGGCGGCGGCGGTGGTC
GGTGCGGGAGGAGGGAGGGGAGCTTGCGGGCCCGAGAGGGGGCGACGGCGGCGGCGGTGGCCTGAGGAGGCCCGA
GCGGCGGCGGTGGCGGCGAAGGCCGAGGCG
>SETDIA1_Bidirectional_Promoter
(SEQ ID NO: 227)
CGGAGGCGCCCCCTAGTCCCAGGCTCTGCACGCCCTGGCCCCGCCCCTTGACTCGGCCCCGCCCACAGCGGAATC
CGCAGATTCGCCAGGTCGG
>SETD1A2_Bidirectional_Promoter
(SEQ ID NO: 228)
CGGAGGCGCCCCCTAGTCCCAGGCTCTGCACGCCCTGGCCCCGCCCCTTGACTCGGCCCCGCCCACAGCGGAATC
CGCAGATTCGCCAGGTCGGATCCTCAGAATTCCTCGGGTCCCTCGATACTCGGCTGAAAATTCTCATCGGACTCT
GAGAGGAGCGCTGGGCTGGAGGCATTTTCCCCAGGGACAGAAGCGGGCTATTCTCTCACTTGGGCCAGTAAGAAA
AATCCAAAAAAAGTTGTCGACTCTGCCAGCAGGGATTGGCTAACGGGCCGTTATTTTCTTGACTCCACCAAGGCG
GATGAAGGGGAGGCTACGGCTGAGGCCGGGAACAGTGGCGAATCTGCAGCCTCTCAGAATTTGGCAGTGCAAGGA
AGGGACGGGGAAGAGAAGCAAAGCGGCGCGCATCCTGTCCAGCGATTCGCCCCGCCCGCCCGGTGAATCTGCGTC
TGCAGAACGCGCCACTGAAGGTTCCCCAGCGCTGGCTGGCCTCCTCCCCTCCGCCCCGCCCCTTTTCCTCAGGGA
CTAGTCGCAGCTTTCGTCGCCGCCGATTCGTCAAGGTCCCGGGCCGCAGCATCTAGATCGTCGTGGCGAAGCCGA
CTCTCCGGGGGATGCGGCCAATCTCCAAGCTCCCTGGGCCGCAACTTCCGAGCCTCCCAGGGCGCCGGCCGAGGC
GAAGCCGCTACCCTCGGCCCCGTGGGTCCCCCGGCAGCGCCTGTGGCGAAA
>SNORD651_Bidirectional_Promoter
(SEQ ID NO: 229)
GATATCTTTTTTTTTTGAAGCGAGTTTTAACAAGATCAGCTGTTTATTCATTCCACTATGGGGTTGAAGGGATCA
TTGGCCAGCTCAAGGCTTACCTTCTCTTGGGCTGAGATGCTGCTGCCAGCTCTAAAACAGCACTCTGTTCTCAAA
ACCTGGGGGAATGGAGAAGGCGCATACACCTTAGAGACTGCAGATGCAGAGCAGGACAGGCATTTCTGATGACAG
TCAATTAATGACTTTACAAATTTAAGTCCATCCTAACAAAAGCCCCTT
>SNORD652_Bidirectional_Promoter
(SEQ ID NO: 230)
GATATCTTTTTTTTTTGAAGCGAGTTTTAACAAGATCAGCTGTTTATTCATTCCACTATGGGGTTGAAGGGATCA
TTGGCCAGCTCAAGGCTTACCTTCTCTTGGGCTGAGATGCTGCTGCCAGCTCTAAAACAGCACTCTGTTCTCAAA
ACCTGGGGGAATGGAGAAGGCGCATACACCTTAGAGACTGCAGATGCAGAGCAGGACAGGCATTTCTGATGACAG
TCAATTAATGACTTTACAAATTTAAGTCCATCCTAACAAAAGCCCCTTAAGACCTAATTAGAGGTAATTTTTCTA
AGTTTTTGTAAATTATTGAGGACTACAAATCTTAATTAGCTTCTCAGTAGGTTGTAATTTTTTTTTTTTTTTTGA
GATGGAGTCTCGCTGTTGCCCAGGCTGGAGTGCAGTGGCACGATTTCGACTCACTACAACCTCCGCCTCCCGGGT
TCAAGCGATTCTCCTGGCTCAGCCCCCAAAGTAGCTGGGATTACAAGTACACGCCACCACACCCGGCTAATTTTT
GTATTTTTGGTAGAGATGGGGTTTCACCATGTCGGCCAGCCAGGCTGGTCTTGAACTCCTGACCTCAGGTGATCC
ACCCACCTTAGCCTCCCAAAGTGCTGGGATTACAGGCCACTGTGCCCAGCCTCAGGGGAGTTGTAATCTCCATTT
CAGTCATATCAATTTAAACTTCACAAAGCTAAGATTACTTTTCCTTTTCACATCTGAGGAAAACTACATCTC
>SPDYA1_Bidirectional_Promoter
(SEQ ID NO: 231)
AGGGAGGGGCGGGGTTCGCCGGCGCGCACTCCCAGGCAGGCCCCGCCCCCTCGGCCGGCTGTGCGCGCTGATTGG
CCCCTGCCGGCCTCGCGCTCCCTCGCTCCGGGTTGGCGGGAGACCTTAGAGC
>SPDYA2_Bidirectional_Promoter
(SEQ ID NO: 232)
AGGGAGGGGCGGGGTTCGCCGGCGCGCACTCCCAGGCAGGCCCCGCCCCCTCGGCCGGCTGTGCGCGCTGATTGG
CCCCTGCCGGCCTCGCGCTCCCTCGCTCCGGGTTGGCGGGAGACCTTAGAGCGGGTACCGCTGCTGGCTAGCGAC
CGACGAGCAACCGTCTGAGGCCAGGAGCGCTGCGACGGAGCCTTGACCGCCGTTGCCCGGCCCTCTCCCGCGCAG
CCCCGGGCTTCCGCAG
>SRP_Bidirectional_Promoter
(SEQ ID NO: 233)
GGTCGGATACCGGCGCAGAATAGCACTAGAAGCTGTGGTATGGTGACGTCATCAACTGGGCCAGCCCACAACGCC
TCTAAGATTTCATTTTACTCACCCAGCGAAACAACCTGACCACACTGCGCACGCGTTTCCTTTGAGCACTGCATT
CTGGGTAAACTGTCTCAAAAATTTGAAGAGCGCATGCGTGGGCCAGCTTCTTCCTTTTACCTCGTTGCACTGCTG
AGAGCAAG
>TAF151_Bidirectional_Promoter
(SEQ ID NO: 234)
CTCAGGGTCAGATTCGTGTACGATTTCGTTTTAATGTACCCTTTTCTTCCAGCATCCTTGTTTGCTACTCGGCGA
GACAGTTACAACAAACCGGGAAGCGATCAGGTACGCGAGCTGGTCACGACTCACAGTCCCAGAGCTCGCCGACTC
CGAACGCCCCCAGGTGGCCCAAGCACTCTGCAGCAAAAGCCGCCAGCTAGGACGTACCATTCGAAATTGTAGGGA
AAGAAAGGCTTTGCATAACCAAATACTCTGTGTTTATAAGGTCCCTCCTCTTTCGTTTCCTAACCGCAAATTCCA
TCACACCCAATAAAGTGAGAAATAGGATTGTAAATAAGACGGAGCAAGTAGGTTCCACTTCCTCCCCGATCGTGA
TCGTGGCATTGGTACTTTCTCTTCTCAATTCCCTCTCAATAATGGTACGGCTAGCGGAGGGGGGAATAGAGGGCC
CTGGGAAGGCCTCAGGGCTCGGCGGCTAGTACCAGTGCAGAAACATCCCTCCTGCCGCAGCTTTGTGGTACCACC
CGCTGCCCGCTGATTGGCTGCCGGGGTCCCGC
>TAF152_Bidirectional_Promoter
(SEQ ID NO: 235)
CTCAGGGTCAGATTCGTGTACGATTTCGTTTTAATGTACCCTTTTCTTCCAGCATCCTTGTTTGCTACTCGGCGA
GACAGTTACAACAAACCGGGAAGCGATCAGGTACGCGAGCTGGTCACGACTCACAGTCCCAGAGCTCGCCGACTC
CGAACGCCCCCAGGTGGCCCAAGCACTCTGCAGCAAAAGCCGCCAGCTAGGACGTACCATTCGAAATTGTAGGGA
AAGAAAGGCTTTGCATAACCAAATACTCTGTGTTTATAAGGTCCCTCCTCTTTCGTTTCCTAACCGCAAATTCCA
TCACACCCAATAAAGTGAGAAATAGGATTGTAAATAAGACGGAGCAAGTAGGTTCCACTTCCTCCCCGATCGTGA
TCGTGGCATTGGTACTTTCTCTTCTCAATTCCCTCTCAATAATGGTACGGCTAGCGGAGGGGGGAATAGAGGGCC
CTGGGAAGGCCTCAGGGCTCGGCGGCTAGTACCAGTGCAGAAACATCCCTCCTGCCGCAGCTTTGTGGTACCACC
CGCTGCCCGCTGATTGGCTGCCGGGGTCCCGCAGTCCGCCTCAGCCCGCCGCGCCGCCCTCAGTACAGCTCCGGC
CGCCGCGCCGCCTGGC
>TAF153_Bidirectional_Promoter
(SEQ ID NO: 236)
CTCAGGGTCAGATTCGTGTACGATTTCGTTTTAATGTACCCTTTTCTTCCAGCATCCTTGTTTGCTACTCGGCGA
GACAGTTACAACAAACCGGGAAGCGATCAGGTACGCGAGCTGGTCACGACTCACAGTCCCAGAGCTCGCCGACTC
CGAACGCCCCCAGGTGGCCCAAGCACTCTGCAGCAAAAGCCGCCAGCTAGGACGTACCATTCGAAATTGTAGGGA
AAGAAAGGCTTTGCATAACCAAATACTCTGTGTTTATAAGGTCCCTCCTCTTTCGTTTCCTAACCGCAAATTCCA
TCACACCCAATAAAGTGAGAAATAGGATTGTAAATAAGACGGAGCAAGTAGGTTCCACTTCCTCCCCGATCGTGA
TCGTGGCATTGGTACTTTCTCTTCTCAATTCCCTCTCAATAATGGTACGGCTAGCGGAGGGGGGAATAGAGGGCC
CTGGGAAGGCCTCAGGGCTCGGCGGCTAGTACCAGTGCAGAAACATCCCTCCTGCCGCAGCTTTGTGGTACCACC
CGCTGCCCGCTGATTGGCTGCCGGGGTCCCGCAGTCCGCCTCAGCCCGCCGCGCCGCCCTCAGTACAGCTCCGGC
CGCCGCGCCGCCTGGCTTTCGTATTCGTTGTTCTCGGCGGGCTGTGGGGCCTCCGCGCCGCGGCCGTTAGTC
>TBL31_Bidirectional_Promoter
(SEQ ID NO: 237)
CGAAGCACCCTCACAGCTCACGGCCCTCCCTCCAGGCCGGAAACGTCTCCGCCCGCTTCCGCTTCCCGATGCAGC
CGCCACTGCCCGAAGCAAAGATGGCGCCAAGTGCGCGGCGCCGGGGGGACGTCACAGTGGTCGCGCGCGGTGAC
GCCATCGCAGCGCGCC
>TBL32_Bidirectional_Promoter
(SEQ ID NO: 238)
CGAAGCACCCTCACAGCTCACGGCCCTCCCTCCAGGCCGGAAACGTCTCCGCCCGCTTCCGCTTCCCGATGCAGC
CGCCACTGCCCGAAGCAAAGATGGCGCCAAGTGCGCGGCGCCGGCGGGGACGTCACAGTGGTCGCGCGCGGTGAC
GCCATCGCAGCGCGCCGGGAGTGTGGCGTTCTGTGAAGAGTTCGGTGCTAACCTCCCTCACGCGGCGGTGGCTGC
CGGGACCCTAGCAGGTTTCAGCTGGAGCGGCGGCGGCGGCAAC
>ZFY1_Bidirectional_Promoter
(SEQ ID NO: 239)
TTTTTTTAAAGCCAACAAAGGAGACAGTGGGGAATGCTATATGTCTGTATCTGCTTTCCTCCTCAACCCTAGGAA
TAAAGTAAACACGTTTACTGAGGGCGGGGGTCTAAGGGCCTGCAACAATGAGATCTGTCGCCTTGGCTAGGACTG
GCGCCGAGAGGCGATAGGTCTCGGGAGAGCCTGGCGCAGGGTGTGGGAGATTAGGAATCCCAGGTCCACCGGAGA
TGGCAGGGGGTGGCCTGGCCCGGTGCGGGGCCGCTTGCCTGCACGCAACCAACTAAGGCGGTGGTGCGCAAGT
>ZFY2_Bidirectional_Promoter
(SEQ ID NO: 240)
TTTTTTTAAAGCCAACAAAGGAGACAGTGGGGAATGCTATATGTCTGTATCTGCTTTCCTCCTCAACCCTAGGAA
TAAAGTAAACACGTTTACTGAGGGGGGGGGTCTAAGGGCCTGCAACAATGAGATCTGTCGCCTTGGCTAGGACTG
GCGCCGAGAGGCGATAGGTCTCGGGAGAGCCTGGCGCAGGGTGTGGGAGATTAGGAATCCCAGGTCCACCGGAGA
TGGCAGGGGGTGGCCTGGCCCGGTGCGGGGCCGCTTGCCTGCACGCAACCAACTAAGGCGGTGGTGCGCAAGTAG
TGGTGACGGCGGGCGCGCGGAGAAAAGGAACGTTGTGACGGAAACTCCAGCTGCCGGAGACCCCACCGCAGTGAG
GTCACTGGACTCCCCGGACTCGGGGCGTGACCGGCGCCGACCCGGGGCGCCGAGAGGCCCACCGGGCGGAGGGGG
CCCAACTACCATCCCGCATTTTCCTGGGTCTCTCTCCCGGGCGGTGACGTGACGTGCTGACGGCGGGCCCGTGCC
GGGGAGCTGGGCCGCTTTTTGTCAGCTCCGAACTCGGCCCCTCCTCCCTCCCTCCGCCCGCCCTACCAGCCGGAG
CCCGGCCCAGTGCTCCAGAGAAAGGCCGTCCTGCAGCACCCGCCGCTGTCGCCGACCGCCCGCACATCCGTCGGG
TGAGTCCCGCGTGCCCCCGCGGCCGCGGG
>SRP-RPS29
(SEQ ID NO: 241)
CTTGCTCTCAGCAGTGCAACGAGGTAAAAGGAAGAAGCTGGCCCACGCATGCGCTCTTCAAATTTTTGAGACAGT
TTACCCAGAATGCAGTGCTCAAAGGAAACGCGTGCGCAGTGTGGTCAGGTTGTTTCGCTGGGTGAGTAAAATGAA
ATCTTAGAGGCGTTGTGGGCTGGCCCAGTTGATGACGTCACCATACCACAGCTTCTAGTGCTATTCTGCGCCGGT
ATCCGACC
>7skl_Bidirectional_Promoter
(SEQ ID NO: 242)
GAGGTACCCAAGCGGCGCACAAGCTATATAAACCTGAAGGAAGTCTCAACTTTACACTTAGGTCAAGTTGCTTAT
CGTACTAGAGCTTCAGCAGGAAATTTAACTAAAATCTAATTTAACCAGCATAGCAAATATCATTTATTCCCAAAA
TGCTAAAGTTTGAGATAAACGGACTTGATTTCCGGCTGTTTTGACACTATCCAGAATGCCTTGCAGATGGGTGGG
GCATGCTAAATACT
>7Sk2_Bidirectional_Promoter
(SEQ ID NO: 243)
GAGGTACCCAAGCGGCGCACAAGCTATATAAACCTGAAGGAAGTCTCAACTTTACACTTAGGTCAAGTTGCTTAT
CGTACTAGAGCTTCAGCAGGAAATTTAACTAAAATCTAATTTAACCAGCATAGCAAATATCATTTATTCCCAAAA
TGCTAAAGTTTGAGATAAACGGACTTGATTTCCGGCTGTTTTGACACTATCCAGAATGCCTTGCAGATGGGTGGG
GCATGCTAAATACTGCAGTCTCCATTGGTGAGGTCGTCCCGGAGCCTCGCCCAGCTCCCGCGCGCTAGAGCCGCC
TGCTGGTCTCACCCAGCCGGGACCGCTGACCTGGCGCTTTGTGCGGCTCCAGGCCTCCGAGTGGACTCCAGAAAG
CCTGAAAAGCTATC
>7sk3_Bidirectional_Promoter
(SEQ ID NO: 244)
GAGGTACCCAAGCGGCGCACAAGCTATATAAACCTGAAGGAAGTCTCAACTTTACACTTAGGTCAAGTTGCTTAT
CGTACTAGAGCTTCAGCAGGAAATTTAACTAAAATCTAATTTAACCAGCATAGCAAATATCATTTATTCCCAAAA
TGCTAAAGTTTGAGATAAACGGACTTGATTTCCGGCTGTTTTGACACTATCCAGAATGCCTTGCAGATGGGTGGG
GCATGCTAAATACTGCAGTCTCCATTGGTGAGGTCGTCCCGGAGCCTCGCCCAGCTCCCGCGCGCTAGAGCCGCC
TGCTGGTCTCACCCAGCCGGGACCGCTGACCTGGCGCTTTGTGCGGCTCCAGGCCTCCGAGTGGACTCCAG
>_RMRP-CCDC107
(SEQ ID NO: 245)
TGCCGGCCCACGGGTGGAGGGATCGGGCGGGCGGTGCCGAAGCGGTCCGGCATTGGCCGGCCGCCCCAACGCGCA
CGCGCACGCGAGCAGGCCGGCCGGCTCCGGGGAGGCCACGCCCACTCCCCGTAGGGGGGGGCCAGACCATATTTG
CATAAGATAGTGTCATTCTAGCTTTCCTGTATTTGTTCATTTCGTGTCTATTAGCTATTCTGCTAGCCACAATGC
CTCTGAAAGCCTATAGTCTTAGAAAGTTATGCCCGAAAACGGTTTTTTTAATCTCACGCCACCAACTTTCTCACC
CTAATCATAAAACACAATTTCTTTAGGGCTATAAAATACTACTCTGTGAAGCTGAGGACGT
>ALOXE3_Bidirectional_Promoter
(SEQ ID NO: 246)
TCTTCACGAGAGCTTTACTTTTTGCTTATAAGAGGGTTCTCTATAGGAAAAGCCAGGCTTGTAGAACCGACAGAG
GATTTTATCTGTGCAGCATAGAATATTTTGGCACAGATTTGGAAGCAGCGGGTGAAGCTCGCCTGCTGCTGATTG
AGCTTTTTCTGCCTCCCGTTCTTAGAGCCCCCGCCGAGGCTGCGACGCAGGGACTGTACCATAGTAGAGGCTGGA
ACAGTGCGGCGCCGGAACCGGCCGCGCGGGGCCGCTGCGGGCTATGGGCTTCTCTGAGAGGTTCCTCCCCAGTCC
CTAGTGGCCCAGATCCCGGACACCTGGGCTCCCGCCCAGGATCCTGCAGGCCCAGGGCGGTCCTGGAGCGGAAAG
A
>CGB1_Bidirectional_Promoter
(SEQ ID NO: 247)
TTGTCGGGCCCATCCTTTCTTCCCTTTGATCTTACGCAGGGTGATGGAGCCAATCACAAGAGGCTCATCCCTGAC
GTCACCCAGTCCCCAGGGCCAGTGAGGGCCCTGCGTTCCGTGGCGCCCCCTGGAGGGAGGAAGGGGAACTGCATC
TGAGAGAGAGCAGCCAATTGGGTCCGCTGACTCTGGCCAGGTTCCCGTGCCGCGTCCAACACCCCTCACTCCCTG
TCTCACTCCCCCACGGAGACTCAATTTACTTTCCATGTCCACATTCCCAGTGCTTGCGGAAGATATCCCGCTAAG
AGAGAGAC
>CGB2_Bidirectional_Promoter
(SEQ ID NO: 248)
GTGTCGGGGATCTCCTTTCTTCCTTTTGACCTTACGCAGGGTGATGGAGCCAATCAGGAGAGGCTCACCCCTGAC
GTCACCCAGTCCCCAGGGCCAGTGAGGGCCCTGCGTTCCGTGGCGCCCCCTGGAGGGAGGAAGGGGAACTGTATC
TGAGAGAGAGCAGCCAATTGGGTCCGCTGACTCCGGCCGGGTTCCCGTGCCGCGTCCAACACCCCTCACTCCCTG
TCTCACTCCCCCACGGAGACTCAATTTACTTTCCATGTCCACATCCCCAGTGCTTGCGGAAGATATCCCGCTAAG
AGAGAGAC
>Med16-1_Bidirectional_Promoter
(SEQ ID NO: 249)
GAATATTGAGTTCCACCACCAGCTATTTAAAGCCCCTGGAACAAATGTCTGTACACATAGGCCGACTTCTCTTAA
ATGACCTAGAGATTTAACCTCTATTTATATTAGCCCAATGTGTAATGCAACTAACGTAGTTATTGACTGGAGTTG
AGAAAGTGCTCGTTGTTCTACCAAATATAGCTACGGTGGCTGCTGGGAATTACTGGAAATGGTCGTATGCAAATA
GCCCCGGAGGCGGGGCAGAGCCTGAGCCGCACCGCCCTCCCAGAAGTCTTTGGGAGGCGGCCCCACGCCTCAGGC
GACTGGTTGTTACCGAGGAAGATGGCGGCGCCAGACCCGAGGCGCTAGGGAAGATCGCACCGCGGACGCCCGCTG
AGCTTGGCGCACGGGCCAGGAGCTGGTGACTGCCCTC
>Med16-2_Bidirectional_Promoter
(SEQ ID NO: 250)
GAATATTGAGTTCCACCACCAGCTATTTAAAGCCCCTGGAACAAATGTCTGTACACATAGGCCGACTTCTCTTAA
ATGACCTAGAGATTTAACCTCTATTTATATTAGCCCAATGTGTAATGCAACTAACGTAGTTATTGACTGGAGTTG
AGAAAGTGCTCGTTGTTCTACCAAATATAGCTACGGTGGCTGCTGGGAATTACTGGAAATGGTCGTATGCAAATA
GCCCCGGAGGCGGGGCAGAGCCTGAGCCGCACCGCCCTCCCAGAAGTCTTTGGGAGGCGGCCCCACGCCTCAGGC
GACTGGTTGTTACCGAGGAAGATGGCGGCGCCAGACCCGAGGCGCTAGGGAAGATCGCACCGCGGACGCCCGCTG
AGCTTGGCGCACGGGC
>DPP9-1_Bidirectional_Promoter
(SEQ ID NO: 251)
CCTGATAGGTAGCATCCTCTCCGGATATCCTTAATAGTGGGGGATCATGGGTTTGACTGAGTGATACCAAGTCAC
AGGGGGGTGTCTCTCCCTAACCCACCGGAAGATGTCGTTCATGGGGCGTTACGCACCTTAGGCCGCCGCGCCGCG
GGCTCCCCCCCAAGCGCCGCGGACGCCTTGGTACGTGCCTGGTGGTGTCCAATCCCAGGCCGCCGCCTGGGTCGC
TCAACTTCCGGGTCAAAGGTGCCTGAGCCGGCGGGTCCCCTGTGTCCGCCGCGGCTGTCGTCCCCCGCTCCCGCC
ACTTCCGGGGTCGCAGTCCCGGGCATGGAGCCGCGACCGTGAGGCGCCGCTGGACCCGGGACGACCTGCCCAGTC
CGGCCGCCGCCCCACGTCCCGGTCTGTGTCCCACGCCTGCAGCTGGAATGGAGGCTCTCTGGACCCTTTAGAAGG
CACCCCTGCCCTCCTGAGGTCAGCTGAGCGGTTA
>DPP9-2_Bidirectional_Promoter
(SEQ ID NO: 252)
CCTGATAGGTAGCATCCTCTCCGGATATCCTTAATAGTGGGGGATCATGGGTTTGACTGAGTGATACCAAGTCAC
AGGGGGGTGTCTCTCCCTAACCCACCGGAAGATGTCGTTCATGGGGCGTTACGCACCTTAGGCCGCCGCGCCGCG
GGCTCCCCCCCAAGCGCCGCGGACGCCTTGGTACGTGCCTGGTGGTGTCCAATCCCAGGCCGCCGCCTGGGTCGC
TCAACTTCCGGGTCAAAGGTGCCTGAGCCGGCGGGTCCCCTGTGTCCGCCGCGGCTGTCGTCCCCCGCTCCCGCC
ACTTCCGGGGTCGCAGTCCCGGGCATGGAGCCGCGACCGTGAGGCGCCGCTGGACCCGGGACGACCTGCCCAGTC
CGGCCGCCGCCCCACGTCCCGGTCTGTGTCCCACGCCTGCAGCTGGAATGGAGGCTCTCTGGACCCTTTAGAAG
>DPP9-3_Bidirectional_Promoter
(SEQ ID NO: 253)
CCTGATAGGTAGCATCCTCTCCGGATATCCTTAATAGTGGGGGATCATGGGTTTGACTGAGTGATACCAAGTCAC
AGGGGGGTGTCTCTCCCTAACCCACCGGAAGATGTCGTTCATGGGGCGTTACGCACCTTAGGCCGCCGCGCCGCG
GGCTCCCCCCCAAGCGCCGCGGACGCCTTGGTACGTGCCTGGTGGTGTCCAATCCCAGGCCGCCGCCTGGGTCGC
TCAACTTCCGGGTCAAAGGTGCCTGAGCCGGCGGGTCCCCTGTGTCCGCCGCGGCTGTCGTCCCCCGCTCCCGCC
ACTTCCGGGGTCGCAGTCCCGGGCATGGAGCCGCGACCGTGAGGCGCCGCTGGACCCGGGACGACCTGCCCAGTC
CGGCCGCCGCCCCACGTCCCG
>SNORD13_C8orf41
(SEQ ID NO: 254)
TCCTGACTGCAGCACCAGAAGGCTGGTCTCTCCCACAGAACGAGGATGGAGGGGGGAGGGATCCGTTGAAGAGG
GAAGGAGCGATCACCCAAAGAGAACTAAAATCAAATAAAATAAAACAGAGAGATGTCTTGGAGGAGGGGGCGAGT
CTGACCGGGATAAGAATAAAGAGAAAGGGTGAACCCGGGAGGCGGAGTTTGCAGTGAGCCGAGATCGCGCCACTG
CACTCCAGCCTGGGCGACAGAGTGAGACTCCGTCTCAGTAAAAAAAAAAAAAAAAAAAAGAATAAAGAGGAAAGG
ACGCAAGAAAGGGAAAGGGGACTCTCAGGGAGTAAAAGAGTCTTACACTTTTAACAGTGACGTTAAAAGACTACT
GTTGCCTTTCTGAAGACTAAAAAGAAAAAAAACTTAAAAATTTAAAGAAATAAACTTCTGAGCCATGTCACCAAC
TTAACCACCCCCAGGTACCTGCAACGGCTCGCGCCCGCCGGTGTCTAACAGGATCCGGACCTAGCTCATATTGCT
GCCGCAAAACGCAAGGCTAGCTTCCGCCAGTACTGCCGCAACACCTTCTTATTTCACGACGTATGGTCGTAAAGC
AATAAAGATCCAGGCTCGGGAAAATGACGGAGAGGTGGAACTATAGAGAATAAATTTGCATATATAATAATCCGC
TCGCTAATTGTGTTTCTGTTTTCCTTTGCTAAGGTAGAAACAAAAGAATAATCACAGAATCTCAGTGGGACTTTG
AAAATATCCAGGATTTTATACGTGAAGAATGGATGTATCGCATTACGGTAGTCACCCTATGTGTAAATTAGTGGC
ACATACTTGGCACTCCTTAATGTCAACTATAAGATG
>THEM259_Bidirectional_Promoter
(SEQ ID NO: 255)
GACTCAAGGGTTACTGTCACACCTATTTTAAGCCCTTCAATCAAATCATCTTTTGGTTAGGATAACTTATGGTCG
GTTTCATATTTAGCATAATTTCCTACAGTGGTATGTTGCAGAACAACTTTCGTGCTTACGCTTACTTTGATGTCT
TCGATCACGTAAAATCCCATATCTTATCGTAATTTTACCGCCTTATACTGGCCTCATAGCCGCGGTGGATTGTGG
GTGCCAATATGCAAAAGAGGTGGCCCAGATGCAGGCCCGCCCCCTGGAGCGGCCGAGGTAGGGGGTGAGGCCTCC
GCGGGCGCCGCTGGCATCCCAGCGTTCTCTGCGGGCGCAGGGGGGCCGCTCTTGCCCGGCGTGGCGACTCGCTAG
CGTCAGCAGCGCCGCAGCCGGACGAGAAAGCGGAAGATGGCGGCGGCGGCCGGGAGGCCGTGAGGAGAGCGGCGG
CTGCGAGGGCGGCCGATGGCGGCCGGGAGGCGCCCTCGGACACTTGCGGGTCGTTAGGGCGCGACGCTGGGAGGC
>H1_2-H1_83
(SEQ ID NO: 936)
TGGCAAACACCGCCGGCGCAAACAGCATTTATAATGCGCTCATACCTAAAGCCACTTGTCGGTTACGGTGACTTC
CCAACAAGACATTGCGACATGCAAATACTACAGTGCGTCCCGCCCCCTGGTGTAGTTCCACGCTGGGACGCACAC
GCACTACGGTTCCCGCCTTTAGACGACTGCGCTGGCGATTCCTGGGAGAGGACTGATGACGTCAGCGTTCGGGCT
CC
>H1_2-H1_90
(SEQ ID NO: 937)
TGGCAAACACTGCCGGCTCAAACAGCATTTATAATGCGCTCATACCTAAAGCCACTTGTCGGTTACGGTGACTTC
CCAACAAGACATTGCGACATGCAAATACTGCGGTGCGTCCCGCCCCCTGGTGTAGTTCCACGCTGGGACGCACAC
GCACTACGGTTCCCGCCTTTAGACGACTGCGCCGGCGATTCCTGGGAGAGGACTGATGACGTCAGCGTTCGGGCT
CC
>H1_2-H1_92
(SEQ ID NO: 938)
TGGCAAACAACGCCGGCGCAAACAGCATTTATAATGCGCTCATACCTAAAGCCACTTGTCGGTTACGGTGACTTC
CCAACAAGACATTGCGACATGCAAATATTACAGTGCGTCCCGCCCCCTGGTGTAGTTCCACGCTAGGACGCACAC
GCACTACGGTTCCCGCCTTTAGACGACTGCGCTGGCGATTCCTGGGAGCGGACTGATGACGTCAGCGTTCGGGCT
CC
>H1_2-H1_95
(SEQ ID NO: 939)
TGGCAAAAACTGACGGCTCAAGCAGCATTTATAAGGCTCCCATACCTAAAGACATTTGTCGGTTATGGTGACTTC
CCCACAAGACATTGCGACATGCAAATACTGCGGAGCGTACCCCCTCCCCCTGGCGCAACTCCTCGCTGGGACGCA
CGCGCGCTACGTGTTCCCGCCTTTAGTGACGTCTGCGCCGGCGATTCCTGGGAGAGGGTTGATGACGTCAGCGTT
CGGGCTCC
>H1_2-H1_98
(SEQ ID NO: 940)
TGGGAAAAAGTGGCGGCTCACGCAGCATTTATAAGGCTCCCATACCTAAAGACATTTCACGGTTATGGTGACTTC
CCCACAAGACATAGCGACATGCAAATATTGCGGAGCGTACGCGCCTCCCCCTGTCCTGTGCAGGCATCTTCTCAG
CCAGGACGCACGCGCGCTGCGTGTTCCCGCCCTGAGTGACTTCTGCGCCGGCGATTTCCTGGGAGGAGGGTTGAT
GACGTCAACGTTCGGGCTCC
>H1_2-H1_104
(SEQ ID NO: 941)
TGGCAAAAACTGCCGGCTCAAGCAGCATTTATAATGCGCCCATACCTAAAGCCACTTGTCGGTTACGGTGACTTC
CCAACAAGACATTGCGACATGCAAATACTGCGGTGCGTCCCTCCCCCTGGCGTAACTCCACGCTGGGACGCACGC
GCGCTACGTGTTCCCGCCTTTACTGACGTCTGCGCCGGCGATTCCTGGGAGAGGGTTGATGACGTCAGCGTTCGG
GCTCC
>H1_2-H1_113
(SEQ ID NO: 942)
TGGGAAAAAGTGGCGGCTCACGCAGCATTTATAAGGCTCCCATACCTAAAGACATTTCACGGTTATGGTGACTTC
CCCACAAGACATTGCGACATGCAAATATTGCGGAGCGTACGCCCTCCCCCTGTCCTGTGCAGGCATCTTCTCGCC
AGGACGCACGCGCGCTGCGTGTTCCCGCCTTGAGTGACTTCTGCGCCGGCGATTTCCTGGGAGGAGGGTTGATGA
CGTCAACGTTCGGGCTCC
>H1_2-H1_188
(SEQ ID NO: 943)
TGGGAAAAAGTGGGGGCTCACGCAGCATTTATAAGGCTCCCATACCTAAAGACATTTCACGGTTATGGTGACTTC
CCCCACAATACATAGCGACATGCAAATATCATGGTCCTTCCGCGGGGCGTGCGGCCTCCCCCTGTCCCGTGCCCC
GTAGGCGTCTTCTCAGCCAGGAGACGCACGCGGCGCGCTGCGTGTTCCCGCCCTGAGTGACTTCTGGGCCGGCGA
TTTCCCTGGGAGGAGGGTTGGATGACGTCAGCATCGCCAACGTTCGGGCTCC
>H1_2-H1_189
(SEQ ID NO: 944)
TGGGAAAAAGTGGGGCTCACGCAGAATTTATAAGGCTCCCATACCTAAAGACATTTCACGGTTATGGTGACTTCC
CCCACAATACATAGCGACATGCAAATATCATGGTCCTTCCGCGGGGCGTGCGGCCTCCCCCTGTCCCGTACCCCG
CAGGCGTCTTCTCAGCCAGGAGGCGCACGCGGCGCGCTGCGCCCTGTTCCCGCCCTGAGTGACTAGGGATTCTGG
GCCCGCGATTTCCCGCTGGGAGGCGGGTTGGATGACGTCAGCATCGCCAGCGTTCGGGCTCC
>H1_2-H1_241
(SEQ ID NO: 945)
TGGGAAAAAGTGGGGGCTCACGCAGCATTTATAAGGCTCCCATACCTAAAGACATTTCACGGTTATGGTGACTTC
CCCACAATACATAGCGACATGCAAATATCGCGGGGCGTGCGGCCTCCCCCTGTCCCGTGTAGGCGTCTTCTCAGC
CAGGACGCACGCGCGCTGCGTGTTCCCGCCCTGAGTGACTTCTGGGCCGGCGATTTCCCTGGGAGGAGGGTTGAT
GACGTCATCGCCAACGTTCGGGCTCC
>H1_2-H1_301
(SEQ ID NO: 946)
TGGGAAAAAGTGGGGCTCACGCAGAATTTATAAGGCTCCCATACCTAAAGACATTTCACGGTTATGGTGACTTCC
CCCACAATACATAGCGACATGCAAATATCATGGTCCTTCCGCGGGGCGTGCGGCCTCCCCCTGTCCCGTACCCCG
CAGGCGTCTTCTCAGCCAGGAGGCGCACGCGGCGCGCTGCGCCCTGTTCCCGCCCTGAGTGACTAGGGATTCTGG
GCCCGCGATTTCCCTGGGAGGCGGGTTGGATGACGTCAGCATCGCCAGCGTTCGGGCTCC
>H1_2-H1_306
(SEQ ID NO: 947)
TGGGAAAAAGTGGGGGCTCACGCAGAATTTATAAGGCTCCCATACCTAAAGACATTTCACGGTTATGGTGACTTC
CCCCACAATACATAGCGACATGCAAATATCATGGTCCTTCCGCGGGGCGTGCGGCCTCCCCCTGTCCCGTACCCC
GTAGGCGTCTTCTCAGCCAGGAGACGCACGCGGCGCGCTGCGCCCTGTTCCCGCCCTGAGTGACTAGGGATTCTG
GGCCGGCGATTTCCCTGGGAGGCGGGTTGGATGACGTCAGCATCGCCAGCGTTCGGGCTCC
>H1_2-H1_312
(SEQ ID NO: 948)
TGGGGAAAGGTGGGCTCAAGCAGAATTTATAAGGCTCCCAAAACTAAAGACATTTTTCGGTTATGGTGACTTCCC
CCACAATACACAGCGACATGCAAATATCATGGCCCTTCCGTGGAGTGTGCCCTCCCTGCGCTCGTCCCCCGGGCC
TCTTCTCAGCCAGGAGGCGCACGGCGCGCTGCGCCTGTTCCCGCCCTGGGGACTAGGAGCGCGCCCGCGGTTCCC
GCTGGGAGGCGGGTTGGATGACGTCAGCATCGCCAGCGTTCGGACTCC
>H1_2-H1_352
(SEQ ID NO: 949)
TGGGGAGTGGGGGGCTCAGGCCGAATTTATAAGGCTCCCAAAACGGAAGACATTTTTCAGTTATGGTGACTTCCC
CCACAAGACACAGCGCTATGCAAATATCATGGCCCCTCCGTGGAGTGTGCCCTCCCCGGCCGCTTCTCAGCCAGG
AAGCGCACGGCGCGTCTGCGCCTGTTTCCCGCCCTGGGGACTAGAAAAGCGCCCGCGCATCCCGGCCGGGCCGCG
GGTTGATGACGTCAGCATCGCCAGCGCTCGAGCGCC
>H1_2-H1_370
(SEQ ID NO: 950)
TGGGGAAAGGTGGGCTCAAGCAGAATTTATAAGGCTCCCAAACCTAAAGACATTTTACGGTTATGGTGACTTCCC
CCACAACACACAGCGACATGCAAATATCATGGTCCTTCCGTGGAGTGTGCCCTCCCTGCGCTCGTCCCCCGGGCC
TCTTCTCAGCCAGGAGGCGCACGCGCGCACGCGCGCTGCGCCTGTTCCCGCCCTGGTGACTAGGAGCGCGCCCGC
GGTTCCCGCTGGGAGGCGGGTTGGATGACGTCAGCATCGCCAGCGTTTGGACTCC
>H1_2-H1_398
(SEQ ID NO: 951)
TGGGAAAAAGTGGGGCTCAAGCAGAATTTATAAGGCTCCCAAACCTAAAGACATTTTACGGTTATGGTGACTTCC
CCCACAACACACAGCGACATGCAAATATCATGGTCCTTCCGCGGGGTGTGCGGCCTCCCTGCTCTCGTCCCCCAG
GCGTCTTCTCAGCCAGGAGGCGCACGCGCGCACGCGCGCTGCGCCCTGTTCCCGCCCTGGTGACTAGGGAGCCTG
AGCCCGCGATTTCCCGCTGGGAGGCGGGTTGGATGACGTCAGCATCGCCAGCGTTTGGACTCC
>H1_2-H1_401
(SEQ ID NO: 952)
TGGGGAGTGGGGGGCTCAGGCCGAATTTATAAGGCTCCCAAAACGGAAGACATTTTTCAGTTATGGTGACTTCCC
CCACAAGACACAGCGCTATGCAAATATCATGGCCCCTCCGTGGAGTGTGCCCTGGCCCCGGCCGCTTCTCAGCCA
GGAAGCGCACGGCGCGCTGCGCCTGTTCCCGCCCTGGGGACTAGAAAAGCGCCCGCGCATCCCGCCGGGCCGCGG
GTTGGATGACGTCAGCATCGCCAGCGCTCGAGCGCC
>H1_2-H1_402
(SEQ ID NO: 953)
TGGGGAGTGGCGGCCTCAGGCGGGATTTATAAGGCTCCCAAAACCGGTGCCATTTCTCAGTGAGGGTGACTTCCC
CCACAATACACAGCGGTATGCAAATATCAGTTGCGTCAGAGTAGAGCGCGGCCTCCCCGGCCTCTCCTCAGCCAG
GAAGCGCGCGGCGCTCCTGTTTTCGTCTCCCGCCCCGGTGACGAGAGACGCGCGCGCGCACCGTAGCCGGGCCGC
GGGTTGGTGACGTAAGCGGCATCCGCTTTCGAGCGCC
>H1_14-H1_18
(SEQ ID NO: 954)
CGGCAAATAACGCGCGCAAACAGCATTTATAATGAGCTCATACCTAAAGCCACTTTACGGTTACGGTGACTTCCC
ACAAGACATTGCGGCATGCAAATATTTTAGTGCGTCCCGCCCCTGGTAGTTCCACGCTAGGACGCACACGCACTA
CGGTTCCCGCCTTTAGACTGCGCTGGCGATTCCAGCGAGCGGACTGATGACGTCAGCGTTGGGGCTCC
>H1_16-H1_17
(SEQ ID NO: 955)
CGGCGAACAACGCGCGCAAACAGCATTTATAATGCGCTCATACCTAAAGCCACTTTTCGGTTACGGTGACTTCCC
ACAAGACATTGCGGCATGCAAATATTTTAGTGCGTCCCGCCCCTGGTAGTTCCACGCTAGGACGCACACGCACTA
CGGTTCCCGCCTTTAGACTGCGCTGGCGATTCCAGCGAGCGGACTGATGACGTCAGCGTTGGGGCTCC
>H1_21-H1_27
(SEQ ID NO: 956)
CGGCAAACAACGCGCGCAAACAGCATTTATAATGAGCTCATACCTAAAGCAACTTTACGGTTACGGTGACTTCCC
ACAAGACATTGCGACATGCAAATATTTTAGTGTATCCCGCCCCTGGTAGTTCCACGCTAGGACGCACACGCACTC
CGGTTCCCGCCTTTAGACTGCGCTGGCGATTCCAGGGAGCGGGCTGATGACGTCAGTGTTCGGGCTCC
>H1_23-H1_21
(SEQ ID NO: 957)
CGGCAAACAACGCGCGCAAACAGCATTTATAATGAGCTCATACCTAAAGCAACTTTACGGTTACGGTGACTTCCC
ACAAGACATTGCGACATGCAAATATTTTAGTGTATCCCGCCCCTGGTAGTTCCACGCTAGGACGCACACGCACTC
CGGTTCCCGCCTTTAGACTGCGCTGGCGATTCCAGGGAGCGGACTGATGACGTCAGTGTTCGGGCTCC
>H1_23-H1_24
(SEQ ID NO: 958)
CGGCCAACAGCTCGCGCAAACAGCATTTATAATGAGCTCATACCTAAAGCAACTTTACGGTTACGGTGACTTCCC
ACAAGACATTGCGACATGCAAATATTTTAGTGTATCCCGCCCCTGGTAGTTCCACGCTAGGACGCACACGCACTG
CGGTTCCCGCCTTTAGACTGCGCTGGCGATTCCAGGGAGCGGACTGATGACGTCAGTGTTCGGGCTCC
>H1_25-H1_26
(SEQ ID NO: 959)
CGGCAAACAATGCGCGCAAACAGCATTTATAATGAGCTCATACCTAAAGCCACTTTACGGTTACGGTGACTTCCC
ACAAGACATTGCGATATGTAAATATTTTAGTGCATCCCGCCCCTGGTAGTTCCACGCTAGGACGCACACGCACTA
CGGTTCCCGCCTTTAGATTGCGCTGGCGATTCCAGGGAGCGGACTGATGACGTCAGCGTTCGGGCTCC
>H1_27-H1_28
(SEQ ID NO: 960)
CGGCAAACAACGCGCGCAAACAGCATTTATAATGAGCTCATACCTAAAGCAACTTTTCGGTTACGGTGACTTCCC
ACAAGCCATTGCGACATGCAAATATTTTAGTGTATCCCGCCCCTGGTAGTTCCACGCTAGGACGCACACGCACTC
CGGTTCCCGCCTTTAGACTGCGCTGGCGATTCCGGGGAGCGGGCTGATGACGTCAGTGTTCGGGCTCC
>H1_31-H1_33
(SEQ ID NO: 961)
CGGCAAACAATGCGTGCACACAGCACTTATAATGCGCTCACACCTAAAGCCACTTTTCAGTTACGGTGACTTCCC
ACAAGACATTGCGATATGCAAATATTTTAGCGCATCCCGCCCCTGGTAGTTCCACGCGAGGACGCACACGCACTA
CGGTTCCCGCCTTTAGACTGCGCTGGCGATTCCAGGGAGCGGCCTGATGACGTCAGCGTTCGGGCTCC
>H1_34-H1_32
(SEQ ID NO: 962)
CGGCAAACAATGCGTGCACACAGCATTTATAATGCGCTCACACCTAAAGCCACTTTTCAGTTACGGTGACTTCCC
ACAAGACATTGCGATATGCAAATATTTTAGCGCGTCCCGCCCCTGGTAGTTCCACGCGAGGACGCACACGCACTA
CGGTTCCCGCCTTTAGACTGCGCTGGCGATTCCAGGGAGCGGCCTGATGACGTCAGCGTTCGGGCTCC
>H1_35-H1_37
(SEQ ID NO: 963)
CGGCAAACAGTGCGCGCAAACAGCATTTATAATGCGCTCATACCTAAAGCCACTTTTCGGTTACGGTGACTTCCC
ACAAGACATTGCGACATGCAAATATTTTAGTGCGTCCCGCCCCTGGTAGTTCCACGCTAGGACGCACACGCACTA
CGGTTCCCGCCTTTAGACTGCGCTGGCGATTCCTGGGAGCGGACTGATGACGTCAGCGTTCGGGCTCC
>H1_36-H1_20
(SEQ ID NO: 964)
CGGCAAACAACGCGCGCAAACAGCATTTATAATGCGCTCATACCTAAAGCCACTTTACGGTTACGGTGACTTCCC
ACAAGACATTGCGACATGCAAATATTTTAGTGCATCCCGCCCCTGGTAGTTCCACGCTAGGACGCACACGCACTA
CGGTTCCCGCCTTTAGACTGCGCTGGCGATTCCAGGGAGCGGACTGATGACGTCAGCGTTCGGGCTCC
>H1_39-H1_22
(SEQ ID NO: 965)
CGGCAAACAACGCGCGCAAACAGCATTTATAATGAGCTCATACCTAAAGCAACTTTACGGTTACGGTGACTTCCC
ACAAGACATTGCGACATGCAAATATTTTAGTGTATCCCGCCCCTGGTAGTTCCACGCTAGGACGCACACGCACTA
CGGTTCCCGCCTTTAGACTGCGCTGGCGATTCCAGGGAGCGGACTGATGACGTCAGTGTTCGGGCTCC
>H1_39-H1_89
(SEQ ID NO: 966)
CGGCAAACAACGCGCGCAAACAGCATTTATAATGAGCTCATACCTAAAGCAACTTTACGGTTACGGTGACTTCCC
ACAAGACATTGCGACATGCAAATATTTTAGTGTATCCCGCCCCTGGTAGTTCCACGCTAGGACGCACACGCACTA
CGGTTCCCGCCTTTAGACTGCGCTGGCGATTCCAGGGAGCGGGCTGATGACGTCAGCGCCCGGGCTCC
>H1_41-H1_40
(SEQ ID NO: 967)
TGGCAAACAATCCGCGCAAACAGCATTTATAATGCGCTCATACCTAGAGCCACTTTTCGGTTACGGTGACTTCTC
ACAAGACATTGGGACATGCAAATATTACAGTGCGTCCCGCCCCTGGTTAGTTCTACGCTAGGACGCACACGCACT
ACGGTTCCCGCCTTTAGACTGCGCTGGCGGTTCCTGGGAGCGGACTGATGACGTCAGTGTTCGGGATCC
>H1_41-H1_55
(SEQ ID NO: 968)
TGGCAAACAACGCGCGCAAACAGCATTTATAATGCGCTCATACCTAGAGCCACTTTTCGGTTACGGTGACTTCTC
ACAAGACATTGGGACATGCAAATATTACAGTGCGTCCCGCCCCTGGTTAGTTCTACGCTAGGACGCACACGCACT
ACGGTTCCCGCCTTTAGACTGCGCTGGCGATTCCTGGGAGCGGACTGATGACGTCAGCGTTCGGGATCC
>H1_47-H1_41
(SEQ ID NO: 969)
TGGCAAACAACGCCGGCGCAAACAGCATTTATAATGCGCTCATACCTAGAGCCACTTTTCGGTTACGGTGACTTC
TCAACAAGACATTGGGACATGCAAATATTACAGTGCGTCCCGCCCCTGGTGTAGTTCTACGCTAGGACGCACACG
CACTACGGTTCCCGCCTTTAGACGACTGCGCTGGCGATTCCTGGGAGCGGACTGATGACGTCAGCGTTCGGGATC
C
>H1_47-H1_43
(SEQ ID NO: 970)
TGGCAAACACCGCACGCAAATAGCATTTATAATGTGCTCATACCTAGAGCCACTTTTCGGTTACGGTGACTTCTC
AAAAAGACAGTGGGACATGCAAATATTACAGTGCGTCCCGCCCCTGGTAGGTCTACGCTAGGACGCACGCGCACT
ACGGTTCCCGCCTATAGACTGCGCTGGCGATTCCTGGGAGCGGACTGATGACGTCAGCGTTCGGGATCC
>H1_47-H1_51
(SEQ ID NO: 971)
TGGCAAACAACGCCGGCGCAAACAGCATTTATAATGTGCTCATACCTAGAGCCACTTTTCGGTTACGGTGACTTC
TCAACAAGACATTGGGACATGCAAATATTACAGTGCGTCCCGCCCCTGGTGTAGTTCTACGCTAGGACGCACGCG
CACTACGGTTCCCGCCTATAGACGACTGCGCTGGCGATTCCTGGGAGCGGACTGATGACGTCAGCGTTCGGGATC
C
>H1_47-H1_94
(SEQ ID NO: 972)
TGGCAAACAACGCCGGCGCAAACAGCATTTATAATGTGCTCATACCTAGAGCCACTTTTCGGTTACGGTGACTTC
TCAAAAAGACATTGGGACATGCAAATATTACAGTGCGTCCCGCCCCTGGTGTAGTTCTACGCTAGGACGCACGCG
CACTACGGTTCCCGCCTATAGACGACTGCGCTGGCGATTCCTGGGAGCGGACTGATGACGTCAGCGTTCGGGATC
C
>H1_53-H1_57
(SEQ ID NO: 973)
TGCCAAACAACGCGCGCAAACAGCATTTATAATGCACTCATAAGTAGAGCCACTTTTCGGTTATGGTGACTTCTC
ACAAGGAATTGGGACATGCAAATATTACAGTGCGTCCCGCCCCTGGTAGTTCTGCGCTAGGACGCAGACGCACTA
CGGTTCCCGCCTTTAGACCGCGCTGGCGATTCCTGGGAGCGGACTGATGACGTCAGCGTTCGGGATCC
>H1_59-H1_54
(SEQ ID NO: 974)
TGCCAAACAACGCGCGCAAACAGCATTTATAATGCACTCATAAGTAGAGCCACTTTTCGGTTATGGTGACTTCTC
ACAAGGAATTGGGACATGCAAATATTACAGTGCGTCCCGCCCCTGGTAGTTCTGCGCTAGGACGCAGACGCACTA
CGGTTCCCGCCTTTAGACTGCGCTGGCGATTCCTGGGAGCGGACTGATGACGTCAGCGTTCGGGATCC
>H1_59-H1_60
(SEQ ID NO: 975)
TGCCAAACAACGCGCGCAAACAGCATTTATAATGCACTCATAAGTAGAGCCACTTTTCGGTTATGGTGACTTCTC
ACAAGGAATTGGGACATGCAAATATTACAGTGCGTCCCGCCCCTGGTAGTTCTACGGACGCAGACGCACTACGGT
TCCCGCCTTTAGACTGCGCTGGCGATTCCTGGGAGCGGACTGATGACGTCAGCGTTCGGGATCC
>H1_61-H1_62
(SEQ ID NO: 976)
TGGCAAACACCGCGCGCAACCAGCATTTATAATGCGCTCGTACCTAAAGGCACTTGTCGGTTACGGTGACTTCCC
ACAAGACATTGCGACATGCAAATACTACAGTGCGTCCCGCCCCTGGTAGTTCCACGCTGGGACGCACACGCAGTA
CGGTTCCCGCCTTTAGACTGCGCTGGCGATTCCTGGGAGAGGATTGATGACGTCAGCGTTCGGGCTCC
>H1_63-H1_64
(SEQ ID NO: 977)
CGGCACAAAACGCGGGCAAACAGCATTTATAATGCGCTCATACCTAAAGCCACTTTACGGTTACGGTGACTTCCC
ACAAGACATTGCGACATGCAAATATTTTAGTGCGTCCCGCCCCTGGTAGTTCCACGCTAGGACACACACGCACTA
TGCTTCCGGCCTTTAGACTGCGCCGGTGATTCCAGGGAGCGGACTGATGACGTCAGCGTTCCGGCTCC
>H1_65-H1_63
(SEQ ID NO: 978)
CGGCAAAAAACGCGGGCAAACAGCATTTATAATGCGCTCATACCTAAAGCCACTTTACGGTTACGGTGACTTCCC
ACAAGACATTGCGACATGCAAATATTTTAGTGCGTCCCGCCCCTGGTAGTTCCACGCTAGGACACACACGCACTA
TGGTTCCGGCCTTTAGACTGCGCCGGTGATTCCAGGGAGCGGACTGATGACGTCAGCGTTCGGGCTCC
>H1_66-H1_65
(SEQ ID NO: 979)
CGGCAAACAACGCGCGCAAACAGCATTTATAATGCGCTCATACCTAAAGCCACTTTACGGTTACGGTGACTTCCC
ACAAGACATTGCGACATGCAAATATTTTAGTGCGTCCCGCCCCTGGTAGTTCCACGCTAGGACGCACACGCACTA
CGGTTCCCGCCTTTAGACTGCGCTGGCGATTCCAGGGAGCGGACTGATGACGTCAGCGTTCGGGCTCC
>H1_67-H1_69
(SEQ ID NO: 980)
TGGCGAATAACACGCGCAAAGAGCATTTATAACGCGCTCAGACCTAAAGCCACTTGTCGCTTACGGTGACTTCCC
ATAAGACATTGCAATATGCAAATACTCCAGTGCGTCCCGCCCCTGGCAGTTCCACGCTGGGACGTGCACGCACTA
CGGTTCCCGCCTTTAGACTGCGCTCGCGATTCCTGGGAGAGGGCTGATGACGTCAGCGTTCGGGCTCC
>H1_70-H1_71
(SEQ ID NO: 981)
TGGCGAAAATCACGCGCAAAGAGCATTTATAACGTGCTCAGACCTAAAGCCACTTGTCGCTTACGGTGACTCCCC
ATAAGACATTGCGATATGCAAATACTGCAGTGCGTCCCGCCCCTGGCAGTTCCACGCTGGGACGTACACGTACTA
CGGTTCCCGCCTTTAGACTGCGCTCGCGATTCCTGGGAGAGGGCTGATGACGTCAGCGTTCGGGCTCC
>H1_70-H1_76
(SEQ ID NO: 982)
TGGCGAAAAACACGCGCAAAGAGCATTTATAACGTGCTCAGACCTAAAGCCACTTGTCGCTTACGGTGACTCCCC
ATAAGACATTGCGATATGCAAATACTGCAGTGCGTCCCGCCCCTGGCAGTTCCACGCTGGGACGTGCACGCACTA
CGGTTCCCGCCTTTAGACTGCGCTCGCGATTCCTGGGAGAGGGCTGATGACGTCAGCGTTCGGGCTCC
>H1_77-H1_79
(SEQ ID NO: 983)
CGGCGAAAAACACGCGCAAAGAGCGTTTATAATGCGCTCAGACCTAAAGTAACTTGTCACTTACGGTGACTTCCC
ATAAGACATTGCGATATGCAAATATTCCAGTGCGTCCCGCCCCTGGCAGTTCCACGCCGGGACGTGCACGCACTA
CGGTTCCCGCCTTTAGACTGCGCTGGCGATTCCTGGGAGAGGGCTGATGACGTCAGCGTGCGGGCTCC
>H1_77-H1_80
(SEQ ID NO: 984)
CGGCGAAAAACACGCGCAAAGAGCGTTTATAACGCGCTCAGACCTAAAGCTACTTGTCACTTACGGTGACTTCCC
ATAAGACATTGCGATATGCAAATATTCCAGTGCGTCCCGCCCCTGGCAGTTCCACGCTGGGACGTGCACGCACTA
CGGTTCCCGCCTTTAGACTGCGCTGGCGATTCCTGGGAGAGGGCTGATGACGTCAGCGTGCGGGCTCC
>H1_77-H1_81
(SEQ ID NO: 985)
CGGCGAAAAACACGCGCAAAGAGCGTTTATAACGCGCTCAGACCTAAAGCTACTTGTCACTTACGGTGACTTCCC
ATAAGACATTGCGATATGCAAATATTCCAGTGCGTCCCGCCCCTGGCAGTTCCACGCTGGGACGTGCACGCACTA
CGGTTCCCGCCTTTAGACTGCGCTGGCGATTCCTGGGAGAGGGCTGATGACGTCAGCGTTCGGGCTCC
>H1_77-H1_82
(SEQ ID NO: 986)
TGGCGAAAAACACGCGCAAAGAGCATTTATAACGCGCTCAGACCTAAAGCCACTTGTCGCTTACGGTGACTTCCC
ATAAGACATTGCGATATGCAAATATTACAGTGCGTCCCGCCCCTGGCAGTTCCACGCTGGGACGTGCACGCACTA
CGGTTCCCGCCTTTAGACTGCGCTGGCGATTCCTGGGAGAGGGCTGATGACGTCAGCGTTCGGGCTCC
>H1_82-H1_67
(SEQ ID NO: 987)
TGGCGAAAAACACGCGCAAAGAGCATTTATAACGCGCTCAGACCTAAAGCCACTTGTCGCTTACGGTGACTTCCC
ATAAGACATTGCGATATGCAAATACTACAGTGCGTCCCGCCCCTGGCAGTTCCACGCTGGGACGTGCACGCACTA
CGGTTCCCGCCTTTAGACTGCGCTCGCGATTCCTGGGAGAGGGCTGATGACGTCAGCGTTCGGGCTCC
>H1_83-H1_77
(SEQ ID NO: 988)
TGGCGAAAAACGCGCGCAAAGAGCATTTATAATGCGCTCAGACCTAAAGCCACTTGTCGCTTACGGTGACTTCCC
ATAAGACATTGCGATATGCAAATATTACAGTGCGTCCCGCCCCTGGCAGTTCCACGCTGGGACGTGCACGCACTA
CGGTTCCCGCCTTTAGACTGCGCTGGCGATTCCTGGGAGAGGGCTGATGACGTCAGCGTTCGGGCTCC
>H1_83-H1_87
(SEQ ID NO: 989)
TGGAGGAGAACGCGCGCAAAGAGCATTTATAATGCGCGCAGACCTAAAGCCACTTGTCGCTTACGGTGACTTCCC
ATAAGACATTGCGATATGCAAATATTACAGTGCGTCCCGCCCCTGGCAGTTCCACGCTGGGACGTGCACGCGCTA
CGGTTCCCGCCTTTAGACTGCGCTGGCGATTCCTGGGAGAGGGCTGATGACGTCAGCATTCGGGCTCC
>H1_95-H1_140
(SEQ ID NO: 990)
TGGCAAAAACTGAGCTCAAGCAGCATTTATAAGGCTCCCAAACCTAAAGACATTTGTCGGTTATGGTGACTTCCC
ACAACACATTGCGACATGCAAATACTGCGGAGCGTACCCCCTCCCCTGGCAACTCCTCGCTGGGACGCACGCGCG
CTACGTGTTCCCGCCTTTTGACTGCGCCGGCGATACCTGGGAGAGGGTTGATGACGTCAGCGTTCGGGCTCC
>H1_98-H1_100
(SEQ ID NO: 991)
TGGGAAAGGGTGGGCTCACGCAGCCTTTATAAGGCTCCCAAACTTAAAGACATTTCTCGGTTATGGCGACTTCCC
ACAAGACATAGCGACATGCAAATACTGCAGACCTGTGGCGCCGACCCGGTCCTGTGCAGCCATCTTTACGGCTGG
GACGCACGCGCGCTGCGTGTTCCCGCCCTGTGACTGCGCCGGCGATTACTGGGAGAGGATTGATGACGTCAACGT
TCGGGTTCC
>H1_100-H1_101
(SEQ ID NO: 992)
TGAGAGAGGGTGGGCTCACGCCACCTTTATAAGGCTCCCAAACTTAAAGACATTTCTCGGTTATGGCGACTTCCC
ACAACACATAGCGACATGCAAATACTGCAGACCTGTGGCGCCGACCCGGTCCTGTGCAGCCATCTTTACGGCTGG
GACGCACGCGCGCTGCGTGTTCCCGCCCTGTGACTGCGCCGGCGATTACTGGGAGAGGATTGATGACGTCAACGT
TCGGGTTCC
>H1_109-H1_107
(SEQ ID NO: 993)
CGTAGGAAAACTGCTTCTGTGAGCACTTATAAAACTCCCATAAGTAGAGAGATTTCATAGTTATGGTGACTTCCC
ATAAGACATTGCGACATGCAAATATTGTGGCGCGTTCGTCCCCGTCCGGTGCAGGCAGCTTCGCTCCAGGACGCA
CGCGCAATACATGTTCCCGCCTTGAGACTGCGCCGGCAGATTCCTAGGAAGTGGTTGATGACGTCGATGTTAGGG
ATCC
>H1_111-H1_109
(SEQ ID NO: 994)
CGTAGGAAAACTGCTTCTGTGAGCACTTATAAAACTCCCATAAGTAGAGAGATTTCATAGTTATGGTGACTTCCC
ATAAGACATTGCGACATGCAAATATTGTGGCGCGTTCGTCCCCGTCCGGTGCAGGCAGCTTCGCTCCAGGACGCA
CGCGCAATACATGTTCCCGCCTTGAGACTGCGCCGGCCGATTCCTAGGAAGTGGTTGATGACGTCGATGTTGGGG
CTCC
>H1_112-H1_111
(SEQ ID NO: 995)
CGTAGGAAAACTGCTTCTGTGAGCACTTATAAAACTCCCATAAGTAGAGAGATTTCATAGTTATGGTGACTTCCC
ATAAGACATTGCGACATGCAAATATTGTGGCGCGTTCGTCCCCGTCCGGTGCAGGCAGCTTCGCTCCAGGACGCA
CGCGCACTACATGTTCCCGCCTTGAGACTGCGCCGGCCGATTCCTAGGAAGTGGTTGATGACGTCGATGTTGGGG
CTCC
>H1_113-H1_112
(SEQ ID NO: 996)
CGGAGAAAACCTGCTTCACCGAGCATTTATAAAGCTCCCATACTTAAAGAGATTTCATAGTTATGGTGACTTCCC
ACAAGACATTGCGACATGCAAATATTGTGGAGCGTACTTCCCCGTCCTGTGCAGGCAGCTTCCCGCCAGGACGCA
CGCGCGCTGCGTGTTCCCGCCTTGAGACTGCGCCGGCGATTTCCTAGGAGGGTGGTTGATGACGTCAATGTTCGG
GCTCC
>H1_114-H1_121
(SEQ ID NO: 997)
TGCCGAAAGTTTAGCTCAACCTGCATTTATAAGGCTCCCAAACCTAAAGACATTTGTCGGTTATGGTGACTTCCC
GCAACACATTGCGACATGCAAATACTGCGGAGCGTACCTCCCCTGGCAACTCCTCGCTGGGACGCACGCGCGCTG
CGTGCTCCCGCCTTTTGACTGCGCCGGCGATACTTGGGAGAGGGTTGATGACGTCAGCGTTCTGGCTCC
>H1_117-H1_115
(SEQ ID NO: 998)
TGCCGAAAGTTTAGCTCAACCTGCATTTATAAAGCTCCCAAACCTAAAGACATTTGTCGGTTATGGTGACTTCCC
GCAACACATTGCGACATGCAAATACTGCGGAGTGCACCTCCCCTGGCAACTCCTCGCTGGGACGCACGCGCGCTG
CGTGCTCCCGCCTTTTGACTGCGCCGGCGATACTTGGGAGAGGGTTGATGACGTCAGCGTTCTGGCTCC
>H1_118-H1_114
(SEQ ID NO: 999)
TGCCGAAAGTTTAGCTCAACCTGCATTTATAAGGCTCCCAAACCTAAAGACATTTGTCGGTTATGGTGACTTCCC
GCAACACATTGCGACATGCAAATACTGCGGAGCGTACCCCCTCCCCTGGCAACTCCTCGCTGGGACGCACGCGCG
CTGCGTGCTCCCGCCTTTTGACTGCGCCGGCGATACTTGGGAGAGGGTTGATGACGTCAGCGTTCTGGCTCC
>H1_118-H1_122
(SEQ ID NO: 1000)
TGCCGAAAGTTTAGCTCAACCTGCATTTATAAGGCTCCCAAACCTAAAGACATTTGTCGGTTATGGTGACTTCCC
GCAACACATTGCGACATGCAAATACTGCGGAGTGCACCCCCTCCCCTGGCAACTCCTCGCTGGGACGCACGCGCG
CTGCGTGCTCCCGCCTTTTGACTGCGCCGGCGATACTTGGGAGAGGGTTGATGACGTCAGCGTTCTGGCTCC
>H1_118-H1_123
(SEQ ID NO: 1001)
TGCCGAAAATTTAGCTCAAGCCGCATTTATAAGGCTCCCAAACCTAAATACATTTGTCGGTTATGGTGACTTCCC
GCAACACATTGCGACATGCAAATACTGCGGAGCGTACCCCCTCCCCTGGCAACTCCTCGCTGGGACGCACGCGCG
CTACGTGCTCCCGCCTTTTGACTGCGCCGGCGATACTTGGGAGAGGGTTGATGACGTCAGCGTTCTGGCTCC
>H1_124-H1_126
(SEQ ID NO: 1002)
CGCCGAAAACCAGGCTCAAGCCACATTTATAAGGCTCCCAAAGCGAAATACATTTGTCGGTTATGGTGACTTCCC
GCAACACATTGCGACATGCAAATACTGCGGAGCGTTCCTCCCCTGGCAACTCCTCGCTGGGACGCACGCGCACTA
CGTGCTCCCGCCTTTTGACTGCGCCGGCGATACTTGGGAGAGAGTTGATGACGTCAGCGTTCTGGCTCC
>H1_124-H1_129
(SEQ ID NO: 1003)
CGCCGAAAACCAGGCTCAAGCCACATTTATAAGGCTCCCAAACCGAAATACATTTGTCGGTTATGGTGACTTCCC
GCAACACATTGCGACATGCAAATACTGCGGAGCGTTCCTCCCCTGGCAACTCCTCGCTGGGACGCACGCGCACTA
CGTGCTCCCGCCTTTTGACTGCGCCGGCGATACTTGGGAGAGGGTTGATGACGTCAGCGTTCTGGCTCC
>H1_129-H1_127
(SEQ ID NO: 1004)
CGCCGAAAACCAGGCTCAAGCCACATTTATAAGGCTCGCAAACCGAAATACATTTGTCGGTTATGGTGACTTCCC
GCAACACATTGCGACATGCAAATACTGCGGAGCGTTCCTCCCCTGGCAACTCCTCGCTGGGACGCACGCGCACTA
CGTGCTCCCGCCTTTTGACTGCGCCGGCGATACTTGGGAGAGGGTTGATGACGTCAGCGTTCTGGCTCC
>H1_133-H1_132
(SEQ ID NO: 1005)
CGCCGAAAACCAGGCTCAAGCCACATTTATAAGGCTCCCAAACCTAAGTACATTTGTCGGTTATGGTGACTTCCC
GCAACACATTGCGACATGCAAATACTGCGGAGCGTCCCTCCCCTGGCAACTCCTCGCTGGGACGCACGCGCGCTA
CGTGCTCCCGCCTTTTGACTGCGCCGGCGATACTTGGGAGAGGGTTGATGACGTCAGCGTTCTGGCTCC
>H1_134-H1_133
(SEQ ID NO: 1006)
CGCCGAAAACCAGGCTCAAGCCACATTTATAAGGCTCCCAAACCTAAGTACATTTGTCGGTTATGGTGACTTCCC
GCAACACATTGCGACATGCAAATACTGCGGAGCGTTCCTCCCCTGGCAACTCCTCGCTGGGACGCACGCGCGCTA
CGTGCTCCCGCCTTTTGACTGCGCCGGCGATACTTGGGAGAGGGTTGATGACGTCAGCGTTCTGGCTCC
>H1_135-H1_134
(SEQ ID NO: 1007)
CGCCGAAAACCAGGCTCAAGCCACATTTATAAGGCTCCCAAACCTAAATACATTTGTCGGTTATGGTGACTTCCC
GCAACACATTGCGACATGCAAATACTGCGGAGCGTTCCTCCCCTGGCAACTCCTCGCTGGGACGCACGCGCGCTA
CGTGCTCCCGCCTTTTGACTGCGCCGGCGATACTTGGGAGAGGGTTGATGACGTCAGCGTTCTGGCTCC
>H1_136-H1_137
(SEQ ID NO: 1008)
TGCCGAAAACCTAGCTCAAGCCACATTTATAAGGCTCCCAAACCTAAATACATTTGTCGGTTATGGTGACTTCCC
GCAACACATTGCGACATGCAAATACTGCGGAGCGTACCTCCCCTGGCAACTCCTCGCTGGGACGCACGCGCGCTA
CGTGCTCCCGCCTTTTGACTGCGCCGGCGATACTTGGGAGAGGGTTGATGACGTCAGCGTTCTGGCTCC
>H1_137-H1_124
(SEQ ID NO: 1009)
CGCCGAAAACCAGGCTCAAGCCACATTTATAAGGCTCCCAAACCTAAATACATTTGTCGGTTATGGTGACTTCCC
GCAACACATTGCGACATGCAAATACTGCGGAGCGTACCTCCCCTGGCAACTCCTCGCTGGGACGCACGCGCGCTA
CGTGCTCCCGCCTTTTGACTGCGCCGGCGATACTTGGGAGAGGGTTGATGACGTCAGCGTTCTGGCTCC
>H1_137-H1_138
(SEQ ID NO: 1100)
CGCCGAAAGCCAGGCTCAAGCCACATTTATAAGGCTCCCAAACCTAAATACATTTGTCGGTTATGGTGACTTCCC
GCAACACATTGCGACATGCAAATACTGCGGAGCGTACCTCCCCTGGCAACTCCTCGCTGGGACGCACGCGCGCTA
CGTGCTCCCGCCTTTTGACTGCGCCGGCGACACTTGGGAGAGGGTTGATGACGTCAGCGTTCTGGCTCC
>H1_140-H1_141
(SEQ ID NO: 1101)
TGGCAAAAACTGAGCTCAAGCCGCATTTATAAGGCTCCCAAACCTAAAGACATTTGTCGGTTATGGTGACTTCCC
GCAACACATTGCGACATGCAAATACTGCGGAGCGTACCCCCTCCCCTGGCAACTCCTCGCTGGGACGCACGCGCG
CTACGTGCTCCCGCCTTTTGACTGCGCCGGCGATACTTGGGAGAGGGTTGATGACGTCAGCGTTCTGGCTCC
>H1_141-H1_118
(SEQ ID NO: 1102)
TGCCGAAAACTTAGCTCAAGCCGCATTTATAAGGCTCCCAAACCTAAATACATTTGTCGGTTATGGTGACTTCCC
GCAACACATTGCGACATGCAAATACTGCGGAGCGTACCCCCTCCCCTGGCAACTCCTCGCTGGGACGCACGCGCG
CTACGTGCTCCCGCCTTTTGACTGCGCCGGCGATACTTGGGAGAGGGTTGATGACGTCAGCGTTCTGGCTCC
>H1_141-H1_139
(SEQ ID NO: 1103)
TGCCGAAAACTTAGCTCACGCCGCACTTATAAGGCTCCCAAACCTAAATACATTTGTAGGTTATGGTGACTTCCC
GCAACACATTGCGACATGCAAATACTGCGGAGCGTACCTCCCCTGGCAACTCCTCGCTGGGACGCACGCGCGCTA
CGTGCTCCCGCCTTTTGACTGAGCCGGCGATACTTGGGAGAGGGTTGATGACGTCAGCGTTCTGGCTCC
>H1_141-H1_142
(SEQ ID NO: 1104)
TGCCGAAAGCTTACCTTCGCCCGCCTTATAAGGCTCCCAAACCTAAATACATTTGTAGGTTATGGTGACTTCCCG
CAACACATTGCGACATGCAAATACTGCGGAGCGTACCTCCCCTGGAAACTCCTCGCTGGGACGCACGCGCGTTAC
GTGCTCCCGCCTTTTGACTGAGCCGGCGATACTTGGGAGAGGGTTGATGACGTCAGCGTTCTGGCTCC
>H1_150-H1_146
(SEQ ID NO: 1105)
TGGGAAAGGGTGGCCCCGCCGAGCATTTATAAGACTCCCATACCTAAAGACATTTCTCAGTTATGGTGATTTCCC
TACAACACACAGCAACATGCAAATATCGAGGGGTGTACCGCCCCTGTCCTTTGTAGACGTCTTCTCTCCAGGACG
CACGCGCGCTGTATTCCCGCCTTGTGACTCTAGGCGGGCGATTCCTGGGAGAGGGTTGATGACGTCCAAGTTCTG
GCTTC
>H1_151-H1_150
(SEQ ID NO: 1106)
TGGGAAAGGGTGGCCCCGCCGAGCATTTATAAGACTCCCATACCTAAAGACATTTCTCAGTTATGGTGACTTCCC
TACAACACACAGCAACATGCAAATATCGAGGGGTGTACCGCCCCTGTCCTTTGTAGACGTCTTCTCTCCAGGACG
CACGCGCGCTGTATTCCCGCCTTGTGACTCTAGGCGGGCGATTCCTGGGAGAGGGTTGATGACGTCCAAGTTCTG
GCTTC
>H1_151-H1_153
(SEQ ID NO: 1107)
TGGGAAAGGGTGGCTCCGCCGAGCATTTATAAGACTCCCATACCTAAAGACATTTCTCAGTTATGGTGACTTCCC
ACAACGCACAGCAACATGCAAATATCGAGGGGTGTACCGCCCCTGTCCTTTGTAGACGTCTTCTCTCCAGGACGC
ACGCGCGCTGTATTCCCGCCTTGTGACTAGGCGGGCGATTCCTGGGAGAGGGTTGATGACGCCCAAGTTCTGGCT
TC
>H1_151-H1_155
(SEQ ID NO: 1108)
TGGGAAAGGGTGGCCCCGCCGAGCATTTATAAGACTCCCATACCTAAAGACATTTCTCAGTTATGGTGACTTCCC
ACAACACACAGCAACATGCAAATATCGAGGGGTGTACCGCCCCTGTCCTTTGTAGACGTCTTCTCTCCAGGACGC
ACGCGCGCTGTATTCCCGCCTTGTGACTAGGCGGGCGATTCCTGGGAGAGGGTTGATGACGTCCAAGTTCTGGCT
TC
>H1_157-H1_156
(SEQ ID NO: 1109)
TGGGAAAGGGGGGCTCCGCTGAGCGTTTATAAGGCTCCCATACCTAAAGACATTTCACAGTTATGGTGACTTCCC
ACAACACACAGCAACATGCAAATACAGAGGGGTGTACCGCCCCTGTCCTTTGTAGACGTCTTCTCGCCAGGACGC
ACGCGCGCTGTGTTCCCGCCTTGTGACTCTAGGCGGGCGATTCCTGGGAGAGGGTTGATGACGTCCAAGTTCTGA
CTCC
>H1_157-H1_158
(SEQ ID NO: 1110)
TGGGAGAGGGAGGTTCCGCTGAGCGTTTATAAGGCTCCCATATCTAAAGACATTTCACAGTTATGGTGACTTCCC
ACAACACACAGCAACATGCAAATACAGAGAAGCGTACCACCCCTGTCCTTTGCAGACGTCTTCTAGCCAGGACGC
ACGCGCACTGTGTTCCCGCCTTGTGACTCGAGGCGGGCGATACCTGGGAGAGGGTTGATGACGTCCAAGTTCTGA
CTCC
>H1_157-H1_160
(SEQ ID NO: 1111)
TGGGAAAGGGTGGCTCCGCCGAGCATTTATAAGGCTCCCATACCTAAAGACATTTCTCAGTTATGGTGACTTCCC
TACAACACACAGCAACATGCAAATATCGAGGGGTGTACCGCCCCTGTCCTTTGTAGACGTCTTCTCGCCAGGACG
CACGCGCGCTGTGTTCCCGCCTTGTGACTCTAGGCGGGCGATTCCTGGGAGAGGGTTGATGACGTCCAAGTTCTG
ACTCC
>H1_160-H1_151
(SEQ ID NO: 1112)
TGGGAAAGGGTGGCTCCGCCGAGCATTTATAAGGCTCCCATACCTAAAGACATTTCTCAGTTATGGTGACTTCCC
TACAACACACAGCAACATGCAAATATCGAGGGGTGTACCGCCCCTGTCCTTTGTAGACGTCTTCTCTCCAGGACG
CACGCGCGCTGTGTTCCCGCCTTGTGACTCTAGGCGGGCGATTCCTGGGAGAGGGTTGATGACGTCCAAGTTCTG
ACTCC
>H1_160-H1_159
(SEQ ID NO: 1113)
CAGGCAAAAGCAGTTCGGCCGAGAATTTATAAGGCTCCAATACCTAAAGACATTTCTCAGTTACGGTGACTTCCC
ACAACACACAGCAACATGCAAATATCGAGAGGTGTACCGCCCCTGTCCTTTGTAGACGTCTTCTCTTCGGGACGC
ACGCGCGCTGTGTTCCCGCCTTATGACTCTAGGCGGGCGATTCCTGGGAGAGGGTTGATGACGTCCAAGTTCTGA
CTCC
>H1_160-H1_161
(SEQ ID NO: 1114)
CAGGCAAAAGCAATTCGGCCGAGAATTTATAAGGCTCCAATACCTAAAGACATTTCTCAGTTACGGTGACTTCCC
ACAACACACAGCAACATGCAAATATCGAGAGGTGTACCGCCCCTGTCCTTTGTAGACGTCTTCTCTTCGGGACGC
ACGCGCGCTGTGTTCCCGCCTTATGACTCTAGGCGGGCGATTCCTGGGAGAGGGTTGATGACGTCCAAGTTCTGA
CTCC
>H1_162-H1_157
(SEQ ID NO: 1115)
TGGGAAAAGGTGGCTCCACAGAGCATTTATAAGGCTCCCATACCTAAAGACATTTCTCAGTTATGGTGACTTCCC
TACAACACACAGCAACATGCAAATATCGAGGGGTGTACCGCCCCTGTCCTTTGTAGACGTCTTCTCGCCAGGACG
CACGCGCGCTGTGTTCCCGCCTTGTGACTCTAGGCGGGCGATTCCTGGGAGAGGGTTGATGACGTCCAAGTTCTG
ACTCC
>H1_163-H1_196
(SEQ ID NO: 1116)
TGGGAAAGGGTGGCCCCACAGAGCATTTATAAGGCTCCCATACCTAAAGACATTTCTCAGTTATGGTGACTTCCC
ACAACGCATAGCAACATGCAAATATCGCGGGGAGTACCTCCCCTGTCCCTTGTACGCGTCTTCTCAGGACGCACG
CACGCGCGCTGTGTTCCCGCCCTGTGACTCCAGGCGGGCAATTCCCGGGAGAGGGTTGCTGACGGGAACGTTCAG
GCTCC
>H1_164-H1_167
(SEQ ID NO: 1117)
TGGGAAAGGGTGGTCCTGAGGCGGATTTATAAGGCTCCCACATCTAAAGGCATTTCACAGTCATGGTGACTTCCC
ACAATACATAGCAACATGCAAATTTCGCGGGGAGTACCTCCCCTGTCCCTTGTACGCGGCTTCTCAGGACGCACG
CACGCGCTCTGTGTTCCCGCCCTGTGACTCTAGGAGGGCAATTCCTGGGACAGTGTTCTGACGGGAACGTTCAGG
CTCC
>H1_166-H1_164
(SEQ ID NO: 1118)
TGGGAAAGGGTGGTCCTGAGGCGGATTTATAAGGCTCCCATATCTAAAGGCATTTCACAGTCATGGTGACTTCCC
ACAATACATAGCAACATGCAAATTTCGCGGGGAGTACCTCCCCTGTCCCTTGTACGCGGCTTCTCAGGACGCACG
CACGCGCTCTGTGTTCCCGCCCTGTGACTCTAGGAGGGCAATTCCTGGGACAGTGTTCTGACGGGAACGTTCAGG
CTCC
>H1_169-H1_165
(SEQ ID NO: 1119)
TGGGAAAAGGTGGTCCTGGGGCGGATTTATAAGGCTCCCATATCTAAAGGCATTTCACAGTCATGGTGACTTCCC
ACAATACATAGCAACATGCAAATATCGCGGGGAGTACCTCCCCTGTCCCTTGTACGCGGCTTCTCAGGACGCACG
CACGCGCTCTGTGTTCCCGCCCTGTGACTCTAGGCGGGCAATTCCTGGGACAGTGTTCTGACGGGAACGTTCAGG
CTCC
>H1_171-H1_172
(SEQ ID NO: 1120)
TGGAAAAGAGTGGCCCCAGAGAGCATTTATAAGGCTCCCGCACCTAAATGCATTTATCAGTTATGGTGACTTCCC
ACAATACATAGCAACATGCAAATATAGCGGGGAGTACCTCCCCTGTCCCTTGTCCGTGTCTTCTCAGGACGCACG
CACGCGCGCTGTGTTCCCGCCCTGTGACTCTAAGCGGGCAATTCCTGGAAGAGGCTTGCTGACGGGAACGTTCAG
GCTCC
>H1_171-H1_173
(SEQ ID NO: 1121)
TGGGAAAGAGTGGCCCCAGAGAGCATTTATAAGGCTCCCGCACCTAAATGCATTTATCAGTTATGGTGACTTCCC
ACAATACATAGCAACATGCAAATATAGCGGGGAGTACCTCCCCTGTCCCTTGTACGTGTCTTCTCAGGACGCACG
CACGCGCGCTGTGTTCCCGCCCTGTGACTCTAAGCGGGCAATTCCTGGAAGAGGCTTGCTGACGGGAACGTTCAG
GCTCC
>H1_175-H1_176
(SEQ ID NO: 1122)
TGGGAAAGGGTGGCCCCAGAGAGCATTTATAAGGCTCCCGCACCTAAATGCATTTATCAGTTATGGTGACTTCCC
ACAATACATAGCAACATGTAAATATCGCGGGGAGTACCTCCCCTGTCCCTTGTACGTGTCTTCTCAGGACGCACG
CACGCGCGCTGTGTTCCCGCCCTGTGACTCTAGGCGGGCAATTCCTGGAAGAGGCTTGCTGACGGGAACGTTCAG
GCTCC
>H1_177-H1_171
(SEQ ID NO: 1123)
TGGGAAAGGGTGGCCCCAGAGAGCATTTATAAGGCTCCCGCACCTAAATGCATTTATCAGTTATGGTGACTTCCC
ACAATACATAGCAACATGCAAATATCGCGGGGAGTACCTCCCCTGTCCCTTGTACGTGTCTTCTCAGGACGCACG
CACGCGCGCTGTGTTCCCGCCCTGTGACTCTAGGCGGGCAATTCCTGGAAGAGGCTTGCTGACGGGAACGTTCAG
GCTCC
>H1_177-H1_178
(SEQ ID NO: 1124)
TGGGAAACGGTGGCCCCAAAGAGCACTTATAAAGCCCCCTCACCTAAATGCATTTATCAGTTATGGTGACTTCCC
ACAATACATAGCAACATGCAAATATCGCGGGGAGTACCTCCCCTGTCCCTTGTACGTGTCTTCTCAGGACGCACG
CACGCGCGCTGTGTTCCCGCCCTGTGACTCTAGGTGGACAATTCCTGGGGGAGGCTTGCTGACGGGAACGTTCCG
GCTCC
>H1_177-H1_406
(SEQ ID NO: 1125)
TGGGAAACGGTGGCCCCAAAGAGCATTTATAAAGCTCCCTCACCTAAATGCATTTATCAGTTATGGTGACTTCCC
ACAATACATAGCAACATGCAAATATCGCGGGGAGTACCTCCCCTGTCCCTTGTACGTGTCTTCTCAGGACGCACG
CACGCGCGCTGTGTTCCCGCCCTGTGACTCTAGGCGGGCAATTCCTGGAAGAGGCTTGCTGACGGGAACGTTCCG
GCTCC
>H1_181-H1_182
(SEQ ID NO: 1126)
TGGGAAAGGGTGGCCCCAGCGAGCATTTATAAGGCTCCCGCATCTAAAGACATTTTACAGTTATGGTGACTTCCC
ACAACGCGTAGCAACATGCAAATATCGCAGGGAGTACCGCCCCTGTCCCTTGTACGCGTCTTCTCAGCACGCACG
CACGCGCGCTGTGTTCCCGCCCTGTGACTCCAGGCGGGTATTTCCCGGGGGGGGTTTGCTGACAAGAACGTTCAG
GCTCC
>H1_182-H1_183
(SEQ ID NO: 1127)
TGGGAAAGGGTGGGCCCAGCGAGCATTTATAAGGCTCCCGCATCTAAAGACATTTTACAATTATGGTGACTTCCC
ACAACGCGTAGCAACATGCAAATATCGCAGGGAGTACCGCCCCTGTCCCTTGTACGCGTCTTCTCAGCACGCACG
CACGCGCGCTGTGTTCCCGCCCTGTGACTCCAGGCGGGTATTTCCCGGGGGGGGTTTGCTGACAAGAACGTTCAG
GCTCC
>H1_184-H1_185
(SEQ ID NO: 1128)
TGGGAAAGGGTGGCCCCAGAGAGCATTTATAAGGCTCCCGCACCTAAAGGCATTTAACAGTTATGGTGACTTCCC
ACAACGCGTAGCAACATGCAAATATCGCAGGGAGTACCGCCCCTGTCCCTTGTACGCATCTTCTCAGGACGCACG
CACGCGCGCTGTGTTCCCGCCCTGTGACTCCAGGCGGGCATTTCCCGGGGGGGGTTTGCTGACAGGAACGTTCAG
GCTCC
>H1_188-H1_162
(SEQ ID NO: 1129)
TGGGAAAAGGTGGCCCCACAGAGCATTTATAAGGCTCCCATACCTAAAGACATTTCTCAGTTATGGTGACTTCCC
TACAATACATAGCAACATGCAAATATCGCGGGGCGTACCTCCCCTGTCCCTTGTAGGCGTCTTCTCAGCCAGGAC
GCACGCGCGCTGTGTTCCCGCCCTGTGACTCTAGGCGGGCGATTCCTGGGAGAGGGTTGATGACGTCAACGTTCG
GGCTCC
>H1_188-H1_163
(SEQ ID NO: 1130)
TGGGAAAGGGTGGCCCCAGAGAGCATTTATAAGGCTCCCATACCTAAAGGCATTTCTCAGTTATGGTGACTTCCC
ACAACGCATAGCAACATGCAAATATCGCGGGGAGTACCTCCCCTGTCCCTTGTACGCGTCTTCTCAGGACGCACG
CACGCGCGCTGTGTTCCCGCCCTGTGACTCCAGGCGGGCAATTCCCGGGAGAGGGTTGCTGACGGGAACGTTCAG
GCTCC
>H1_188-H1_170
(SEQ ID NO: 1131)
TGGGAAAGGGTGGCCCCAGAGAGCATTTATAAGGCTCCCGCACCTAAAGGCATTTTACAGTTATGGTGACTTCCC
ACAACGCGTAGCAACATGCAAATATCGCGGGGAGTACCGCCCCTGTCCCTTGTACGCGTCTTCTCAGGACGCACG
CACGCGCGCTGTGTTCCCGCCCTGTGACTCCAGGCGGGCAATTCCCGGGGGGGGTTTGCTGACGGGAACGTTCAG
GCTCC
>H1_188-H1_177
(SEQ ID NO: 1132)
TGGGAAAGGGTGGCCCCAGAGAGCATTTATAAGGCTCCCATACCTAAAGGCATTTCTCAGTTATGGTGACTTCCC
ACAATACATAGCAACATGCAAATATCGCGGGGAGTACCTCCCCTGTCCCTTGTACGCGTCTTCTCAGGACGCACG
CACGCGCGCTGTGTTCCCGCCCTGTGACTCTAGGCGGGCAATTCCTGGGAGAGGGTTGCTGACGGGAACGTTCAG
GCTCC
>H1_188-H1_179
(SEQ ID NO: 1133)
TGGGAAAGGGTGGCCCCAGCGAGCATTTATAAGGCTCCCGCATCTAAAGACATTTTACAGTTATGGTGACTTCCC
ACAACGCGTAGCAACATGCAAATATCGCAGGGAGTACCGCCCCTGTCCCTTGTACGCGTCTTCTCAGGACGCACG
CACGCGCGCTGTGTTCCCGCCCTGTGACTCCAGGCGGGTATTTCCCGGGGGGGGTTTGCTGACAGGAACGTTCAG
GCTCC
>H1_188-H1_180
(SEQ ID NO: 1134)
TGGGAAAGGGTGGCCCCAGCGAGCATTTATAAGGCTCCCGCATCTAAAGACATTTTACAGTTATGGTGACTTCCC
ACAACGCGTAGCAACATGCAAATATCGCAGGGAGTACCGCCCCTGTCCCTTGTACGCGTCTTCTCAGCACGCACG
CACGCGCGCTGTGTTCCCGCCCTGTGACTCCAGGCGGGTATTTCCCGGGGGGGGTTTGCTGACAGGAACGTTCAG
GCTCC
>H1_188-H1_186
(SEQ ID NO: 1135)
TGGGAAAGGGTGGCCCCACCGAGCATTTATAAGGCTCCCGCATCTAAAGACATTTTACAGTTATGGTGACTTCCC
ACAACGCGTAGCAACATGCAAATATCGCGGAGAGTACCGCCCCTGTCCCATGCACGCGTCTTCTCAGCACGCACG
CACGCGCGCTGTGTTCCCGCCCTGTGACTCCAGGCGGGTATTTCCAGGGGCGGGTTTGCTGACAGGAACGTTCAG
GCTTC
>H1_188-H1_198
(SEQ ID NO: 1136)
TGGGAAAAGGTGGCCCCAGAGAGCATTTATAAGGCTCCCATACCTAAAGGCATTTCTCAGTTATGGTGACTTCCC
ACAATACATAGCAACATGCAAATATCGCGGGGAGTACCTCCCCTGTCCCTTGTACGCGTCTTCTCAGGACGCACG
CACGCGCGCTGTGTTCCCGCCCTGTGACTCTAGGCGGGCAATTCCTGGGAGAGGGTTGCTGACGGGAACGTTCAG
GCTCC
>H1_188-H1_203
(SEQ ID NO: 1137)
TGGGAAAAAGTGGGGCCTCACGCAGCATTTATAAGGCTCCCATACCTAAAGACATTTCACGGTTATGGTGACTTC
CCCCACAATACATAGCGACATGCAAATATCATGGTCCTTCCGCGGGGCGTGCCTCCCCCTGTCCCTTGGCCCGTA
GGCGTCTTCTCAGCCAGGAGACGCACGCGGCGCGCTGCGTGTTCCCGCCCTGTGACTTCTAGGCGGGCGATTCCC
TGGGAGAGGGTTGGATGACGTCAGCATCGCCAACGTTCGGGCTCC
>H1_189-H1_1
(SEQ ID NO: 1138)
TGGGAAAAGGTGGGCCCACGCAGAATTTATAAGGCTCCCATACCTAAAGACATTTTACGATTATGGTGACTTCCC
ACAATACATAGCGACATGCAAATATCGCGGGGCGTGCCTCCCCTGTCCCGTCACAGGCGTCTTCTCAGCCAGGGC
GCACGCGCGCTGCGTGTTCCCGCCCTGTGACTCTGGGCCCGCGATTCCTGGGAGCGGGTTGATGACGTCAGCGTT
CGGGCTCC
>H1_189-H1_192
(SEQ ID NO: 1139)
TGGGAAAGGGTGGACCCACCGAGCATTTATAAGGCTCCCGCATCTAAAGACATTTTACAGTTATGGTGACTTCCC
ACAACGCGTAGCAACATGCAAATATCGTGGAGAGTACCGCCCCTGTCCCATGCACGCGTCTTCTCAGCACGCACG
CACGCGCGCTGTGTTTCCCGCCCTGTGACTCCAGGCGGGTATTTCCAGGGGCGGGTTTGCTGACAGGAACGTTCA
GGCTTC
>H1_189-H1_227
(SEQ ID NO: 1140)
TGGGAAAAGGTGGGCCCACGCAGAATTTATAAGGCTCCCATACCTAAAGACATTTCACGATTATGGTGACTTCCC
ACAATACATAGCGACATGCAAATATCGCGGGGCGTGCCTCCCCCTGTCCCGTACCCCACAGGCGTCTTCTCAGCC
AGGGCGCACGCGCGCTGCGTGTTCCCGCCCTGAGTGACTAGGGATTCTGGGCCCGCGATTCCCGTGGGAGCGGGT
TGATGACGTCAGCGTTCGGGCTCC
>H1_189-H1_234
(SEQ ID NO: 1141)
TGGGAAAAGGTGGGCCCACGCAGAATTTATAAGGCTCCCATACCTAAAGACATTTCACGATTATGGTGACTTCCC
ACAATACATAGCGACATGCAAATATCGCGGGGCGTGCCTCCCCTGTCCCGTACCCCACAGGCGTCTTCTCAGCCA
GGGCGCACGCGCGCTGCGTGTTCCCGCCCTGAGTGACTAGGGATTCTGGGCCCGCGATTCCCGTGGGAGCGGGTT
GATGACGTCAGCGTTCGGGCTCC
>H1_189-H1_237
(SEQ ID NO: 1142)
TGGGAAAAGGTGGGCCCACGCAGAATTTATAAGGCTCCCATACCTAAAGACATTTTACGATTATGGTGACTTCCC
ACAATACATAGCGACATGCAAATATCGCGGGGCGTGCCTCCCCTGTCCCGTCACAGGCGTCTTCTCAGCCAGGGC
GCACGCGCGCTGCGTGTTCCCGCCCTGAGTGACTCTGGGCCCGCGATTCCCGTGGGAGCGGGTTGATGACGTCAG
CGTTCGGGCTCC
>H1_189-H1_286
(SEQ ID NO: 1143)
TGGGAAAAGGTGGGCCCACGGAGAATTTATAAGGCTCCCATACCTAAAGACATTTTACGATTATGGTGACTTCCC
ACAACACATAGCGACATGCAAATATCGCGGGGCGTGCCTCCCCTGTCCCGTACAGGCGTCTTCTCAGCCAGGGCG
CACGCGCGCTGCGTGTTCCCGCCCTGTGACTCCGGGCCCGCGATTCCTGGGAGCGGGTTGATGACGTCAGCGTTC
GGGCTCC
>H1_195-H1_184
(SEQ ID NO: 1144)
TGGGAAAGGGTGGCCCCAGAGAGCATTTATAAGGCTCCCGCACCTAAAGGCATTTTACAGTTATGGTGACTTCCC
ACAACGCGTAGCAACATGCAAATATCGCAGGGAGTACCGCCCCTGTCCCTTGTACGCGTCTTCTCAGGACGCACG
CACGCGCGCTGTGTTCCCGCCCTGTGACTCCAGGCGGGCATTTCCCGGGGCGGGTTTGCTGACAGGAACGTTCAG
GCTCC
>H1_196-H1_197
(SEQ ID NO: 1145)
TGAGAAAGGGTGGCTCCACAGAGCATTTATAAGGCTCCCATACCTAAAGACATTTCTCAGTTATGGTGACTTCCC
ACAACGCATAGCAACATGCAAATATCGCGGGGAGTACCTCCCCTGTCCCTTGTACGCGTCTTCTCAGGACGCACG
CACGCGCGCTGTGTTCCCGCCCTGTGACTCCAGGCGGGCAATTCTCGGGAGGGGGTTGCTGACGGGAACGTTCAG
GCTCC
>H1_199-H1_200
(SEQ ID NO: 1146)
TGGGGAAAAACAGCTCACGGCGGCATTTATAAGACTCACAGATCTAAAGCCATTTCACGAATAGGGTGACTTCCC
ACAATACACAGCGACATGCAAACATAGCGGGGCGTGCCTTTCCTGTACCCTGTGGGCATCTCTCCTGGACGCACG
CGCGCCGGGTGTTCCCGCGCTGTGACTCTAGGCAAGCGCTTCCTGGGAGAGAGTTGATGACGGCAGCATTCGGGC
TCC
>H1_203-H1_199
(SEQ ID NO: 1147)
TGGGGAAAAGCGGGCTCCAGGCAGCATTTATAAGACTCACATATCTAAAGACATTTCACGGTTAGGGTGACTTCC
CACAATACACAGCGACATGCAAATATCGCGGGGCGTGCCTCCCCTGTCCCTTGTGGGCATCTTCTCGCCTGGACG
CACGCGCGCCGCGTGTTCCCGCCCTGTGACTCTAGGCGGGCGATTCCTGGGAGAGGGTTGATGACGTCAACATTC
GGGCTCC
>H1_203-H1_202
(SEQ ID NO: 1148)
CGGAGCAAACAGGCCACCAGGCAGCCTTTATAAGACTCACATATCTAAAGACATTTCACAGTTAGGGTGACTTCC
CACAGTACACAGCGATATGCAAATATCGCGGAGCGTGCCTCCCCAGTCTCTGGCGGGCATCTTCTCGCCTACACG
CACGCGCGCCGCGTGTTCCCGCCCTGTGACGCTAGGCGGGCCATTCATGGGAGAGGGTTGATGACGTCAACATTC
GGACTCC
>H1_203-H1_206
(SEQ ID NO: 1149)
TGGAGAAAAGCGGGCTCCAGGCAGCATTTATAAGACTCACATATCTAAAGACATTTCACAGTTAGGGTGACTTCC
CACAATACACAGCGACATGCAAATATCGCGGAGCGTGCCTCCCCTGTCTCTTGTGGGCATCTTCTCGCCTGGACG
CACGCGCGCCGCGTGTTCCCGCCCTGTGACGCTAGGCGGGCGATTCCTGGGAGAGGGTTGATGACGTCAACATTC
GGGCTCC
>H1_203-H1_304
(SEQ ID NO: 1150)
TGGGAAAAAGAGGGGCTTCACGCAGCATTTATAAGGCTCCCATATCTAAAGACATTTCACGGTTAGGGTGACTTC
CCCCACAATACATAGCGACATGCAAATATCATGGTCCTTCCGCGGGGCGTGCCTCCCCCTGTCCCTTGGCCCGTG
GGCATCTTCTCGCCAGGAGACGCACGCGGCGCGCTGCGTGTTCCCGCCCTGTGACTTCTAGGCGGGCGATTCCCT
GGGAGAGGGTTGGATGACGTCAGCATCGCCAACATTCGGGCTCC
>H1_206-H1_207
(SEQ ID NO: 1151)
TGAAGAAAGGCGGCTCTAAGCAGCATTTATAAGACTCACATATCTGAAGACATTTCACAGTTAGGGTGACTTCCC
ACAAGACACAGCGACATGCAAATATCGCGGAATGTGCTTCCCCTGTCTCCTGTGGGCATCTTCTCGCCTGGACGC
ACGCGCACCGCGTGTTCCCGCCCTGTGACGCTAGGCGGGCGATTCCTGGGAGAGGGTTGATGACGTCAACACTCG
GGCTCC
>H1_210-H1_208
(SEQ ID NO: 1152)
TGGGAAAGGGTGGTCCCATACAGAACTTATAAGATTCCCATATCCAAAGACATTTCACGTTTATGGTGATTTCCC
AGAACACATAGCGACATGCAAATATTGCAGGGCGCCACTCCCCTGTCCCTCACAGCCATCTTCCTGCCAGGGCGC
ACGCGCGCTGGGTGTTCCCGCCTAGTGACACTGGGCCCGCGATTCCTTGGAGCGGGTTGATGACGTCAGCGTTCG
AATTCC
>H1_210-H1_209
(SEQ ID NO: 1153)
TGGGAAAGGGTGGTCCCACACAGAACTTATAAGACTCCCATATCCAAAGACATTTCACGTTTATGGTGATTTCCC
AGAACACATAGCGACATGCAAATATTGCAGGGCGCCACTCCCCTGTCCCTCACAGCCATCTTCCTGCCAGGGCGC
ACGCGCGCTGGGTGTTCCCGCCTAGTGACACTGGGCCCGCGATTCCTTGGAGCGGGTTGATGACGTCAGCGTTCG
AATTCC
>H1_210-H1_212
(SEQ ID NO: 1154)
TGGGGAAGGGTGGTCCCATACAGAACTTATAAGATTCCCATACCCAAAGACATTTCACGTTTATGGTGACTTCCC
AGAAGACATAGCGACATGCAAATATTGCAGGGCGTCACTCCCCTGTCCCTCACAGCCATCTTCCTGCCAGGGCGC
ACGCGCGCTGGGTGTTCCCGCCTAGTGACACTGGGCCCGCGATTCCTTGGAGCGGGTTGATGACGTCAGCGTTCG
AATTCC
>H1_210-H1_220
(SEQ ID NO: 1155)
TGGGGAAGGGTGGTCCCATACAGAACTTATAAGATTCCCATACCCAAAGACATTTCACGTTTATGGTGACTTCCC
AGAAGACATAGCGACATGCAAATATTGCAGGGCGTCACTCCCCCTGTCCCTCAACAGTCATCTTCCTGCCAGGGC
GCACGCGCGCTGGGTGTTCCCGCCTAGTGACACTGGGCCCGCGATTCCTTGGAGCGGGTTGATGACGTCAGCGTT
CGAATTCC
>H1_210-H1_225
(SEQ ID NO: 1156)
TGGGAAAGGGTGGTCCCATACAGAACTTATAAGATTCCCATACCCAAAGACATTTCACGTTTATGGTGACTTCCC
AGAACACATAGCGACATGCAAATATTGCAGGGCGTCACTCCCCTGTCCCTCACAGCCATCTTCCTGCCAGGGCGC
ACGCGCGCTGGGTGTTCCCGCCTAGTGACACTGGGCCCGCGATTCCTTGGAGCGGGTTGATGACGTCAGCGTTCG
AATTCC
>H1_213-H1_219
(SEQ ID NO: 1157)
TGGGGAAAGGTGGTCCCATACAGAACTTATAAGATTCCCATACTCAAAGACATTTCACGTTTATGGTGACTTCCC
AGAAGACACAGCGACATGCAAATATTGTAGGGCGTCACACCCCCTGTCCCTCACAGTCATCTTCCTGCCAGGGCG
CACGCGCGCTGGGTGTTCCCGCGTAGTGACACTGGGCCCGCGATTCCTTGGAGCGGGTTGATGACGTCAGCGTTC
GAATTCC
>H1_219-H1_218
(SEQ ID NO: 1158)
TGGGGAAAGGTGGTCCCACACAGAACTTATAAGATTCCCATACTCAAAGACATTTCTCGTTTATGGTGACTTCCC
AGAAGACACAGCGACATGCAAATATTGTAGGGCGTCACACCCCTGTCCCTCACAGTCATCTTCCTGCCAGGGCGC
ACGCGCGCTGGGTGTTCCCGCGTAGTGACACTGGGCCCGCGATTCCTTGGAGCGGGTTGATGACGTCAGCGTTCG
AATTCC
>H1_220-H1_222
(SEQ ID NO: 1159)
TGGGGAAGGGTGGTCCCATACAGAACTTATAAGATTCCCATACTCAAAGACATTTCACGTTTATGGTGACTTCCC
AGAAGACATAGCGACATGCAAATATTGCAGGGCGTCACACCCCCTGTCCCTCAACAGTCATCTTCCTGCCAGGGC
GCACGCGCGCTGGGTGTTCCCGCGTAGTGACACTGGGCCCGCGATTCCTTGGAGCGGGTTGATGACGTCAGCGTT
CGAATTCC
>H1_220-H1_223
(SEQ ID NO: 1160)
TGGGGAAGGGTGGTCCTACACAGAACTTATAAGACTCCCATACTCAAAGACATTTCACGTTTATGGTGACTTCCC
AGAAGACATAGCGACATGCAAATATTGCAGGGCGTCACACCCCCTGTCCCTTACAGCCATCTTCCTGCCAGGGCG
CACGCGCGCTGGGTGTTCCCGCGTAGTGACACTGGGCCCGCGATTCCTTGGAGCGGGTTGATGACGTCAGCGTTC
GAATTCC
>H1_220-H1_224
(SEQ ID NO: 1161)
TGGGGAAGGGTGGTCCTACACAGAACTTATAAGACTCCCATACTCAAAGACATTTCACGTTTATGGTGACTTCCC
AGAAGACATAGCGACATGCAAATATTGCAGGGCGTCACACCCCCTGTCCCTTAACAGTCATCTTCCTGCCAGGGC
GCACGCGCGCTGGGTGTTCCCGCGTAGTGACACTGGGCCCGCGATTCCTTGGAGCGGGTTGATGACGTCAGCGTT
CGAATTCC
>H1_222-H1_213
(SEQ ID NO: 1162)
TGGGGAAGGGTGGTCCCATACAGAACTTATAAGATTCCCATACTCAAAGACATTTCACGTTTATGGTGACTTCCC
AGAAGACATAGCGACATGCAAATATTGCAGGGCGTCACACCCCCTGTCCCTCACAGTCATCTTCCTGCCAGGGCG
CACGCGCGCTGGGTGTTCCCGCGTAGTGACACTGGGCCCGCGATTCCTTGGAGCGGGTTGATGACGTCAGCGTTC
GAATTCC
>H1_227-H1_210
(SEQ ID NO: 1163)
TGGGGAAGGGTGGTCCCACACAGAACTTATAAGATTCCCATACCCAAAGACATTTCACGATTATGGTGACTTCCC
AGAAGACATAGCGACATGCAAATATTGCAGGGCGTGCCTCCCCCTGTCCCTCAACAGTCGTCTTCCTGCCAGGGC
GCACGCGCGCTGGGTGTTCCCGCCTAGTGACACTGGGCCCGCGATTCCTTGGAGCGGGTTGATGACGTCAGCGTT
CGAATTCC
>H1_227-H1_226
(SEQ ID NO: 1164)
TGGGGAAGGGTGGTCCTACACAGAACTTATAAGATTCCCATACCCAAAGACATTTCACGATTATGGTGACTTCCC
AGAAGACACAGCGACATGCAAATATTGCAGGTCGTGCCTCGCCTGTCCCTCACAGTCGTCTTCCTGCCAGGGCGC
ACGCGCGCTGGGTGTCCCGCCAACTGACACTGGGCTCGCGATTCCTTGGAGCGGGTTGATGACGTCAGCGTTCGA
ATTCC
>H1_227-H1_228
(SEQ ID NO: 1165)
TGGGGAAGGGTGGTCCCACACAGAACTTATAAGATTCCCATACCCAAAGACATTTCACGATTATGGTGACTTCCC
AGAAGACACAGCGACATGCAAATATTGCAGGTCGTGCCTCGCCTGTCCCTCACAGTCGTCTTCCTGCCAGGGCGC
ACGCGCGCTGGGTTTCCCGCCAACTGACACTGGGCTCGCGATTCCTTGGAGCGGGTTGATGACGTCAGCGTTCGA
ATTCC
>H1_227-H1_230
(SEQ ID NO: 1166)
TGGGGAAGGGTGGTCCTACGCAGAACTTATAAGATTCCCATACCCAAAGACATTTCACGATTATGGTGACTTCCC
AGAATACACAGCGACATGCAAATATTGCAGGTCGTGCCTCGCCTGTCCCTCACAGTCGTCTTCCTGCCAGGGCGC
ACGCGCGCTGGGTGTCCCGCCAACTGACACTGGGCTCGCGATTCCTTGGAGCGGGTTGATGACGTCAGCGTTCGA
ATTCC
>H1_231-H1_232
(SEQ ID NO: 1167)
TGAGGAAAAATGGTTCCACACAGAATTTATAAGGTTCCCAAATCTAAAGACATTTCACCATTATGGTGATTTCCC
ACAACACATAGCGACATGCAAATATCTCAGAGCGTACCTCCCCTGTCCTATACGGGCGTCAACTCGCCAGGGCGC
ACGCGCGCTGTGTGTTTCCCGCCTGTGACTCGGGACTCTGGGCCCGCGATTCCTCGGAGCGGGTTGAGAACGTCA
GCTCCGGTGCTTC
>H1_233-H1_231
(SEQ ID NO: 1168)
TGAGGAAAAGTGGTTCCACACAGAATTTATAAGGTTCCCAAATCTAAAGACATTTCACCATTATGGTGATTTCCC
ACAACACATAGCGACATGCAAATATCTCAGAGCGTACCTCCCCTGTCCTATACGGGCGTCAACTCGCCAGGGCGC
ACGCGCGCTGTGTGTTTCCCGCCTGTGACTCGGGACTCTGGGCCCGCGATTCCTCGGAGCGGGTTGATAACGTCA
GCTCCGGTGCTTC
>H1_234-H1_235
(SEQ ID NO: 1169)
TGGGAAAAGGTGGGCCCACACAGAATTTATAAGGCTCCCATACCTAAAGACATTTCACGATTATGGTGACTTCCC
ACAATACATAGCGACATGCAAATATCGCGGGGCGTGCCTCCCCTGTCCCGTACCCCACAGGCGTCTTCTCGCCAG
GGCGCACGCGCGCTGCGTGTTCCCGCCCTGTGACTAGGGATTCTGGGCCCGCGATTCCTGGGAGCGGGTTGATGA
CGTCAGCGTTCGGGCTCC
>H1_235-H1_233
(SEQ ID NO: 1170)
TGAGGAAAAGTGGGCCCACACAGAATTTATAAGGTTCCCAAACCTAAAGACATTTCACCATTATGGTGACTTCCC
ACAATACATAGCGACATGCAAATATCTCAGGGCGTGCCTCCCCTGTCCCGTACCCCACGGGCGTCAACTCGCCAG
GGCGCACGCGCGCTGCGTGTTTCCCGCCTGTGACTCGGGACTCTGGGCCCGCGATTCCTGGGAGCGGGTTGATGA
CGTCAGCTCTGGGGCTTC
>H1_238-H1_239
(SEQ ID NO: 1171)
TGGCAGAAAGCGGCCCGCCGCCGCATTTATAAGGCTCTCCCACCTAAAGCCATATAATGGTTATGGTGACTTCCC
AGAATACATGGCAACATGCAAATATCGTGCGGTATACCTCCCCTGTCGCGCGTAGGCGTCTCCTCCCCTGGACGC
ACGGGCGCCGCATGTTCCCGCCCTATGACTCTGGGCCGGCGACTACGGGAGAGAGCTGATGACGTGACCGCGACC
GCTCGGGCTCC
>H1_241-H1_238
(SEQ ID NO: 1172)
TGGGAAAAAGCGGCCCCCCGCCGCATTTATAAGGCTCTCCCACCTAAAGACATTTAACGGTTATGGTGACTTCCC
ACAATACATAGCAACATGCAAATATCGCGCGGTATACCTCCCCTGTCGCGCGTAGGCGTCTCCTCCCCTGGACGC
ACGGGCGCTGCGTGTTCCCGCCCTGTGACTCTGGGCCGGCGACTACGGGAGAGAGCTGATGACGTGACCGCGACC
GCTCGGGCTCC
>H1_242-H1_243
(SEQ ID NO: 1173)
TGGGAAGTAAGAGATTCACGCCGGTTATATAAGATTCCTGTAACTAAAGAAATTTCAAGGATAGGGTGACTTCCC
ACAATACAAAGCGACATGCAAATATCGCGGGGCGTGCCTGTCCTGACCTTTGTGAGACTCTTCGCTAGGACGCAG
GCGTGCTGCGAGTTCCCGCCTTATCGGCGAGTCCTGGGGGAGAGTTGATGACGCCAACATTCGGGCTCC
>H1_242-H1_248
(SEQ ID NO: 1174)
TGGGAAAAAAAGGCTTCACGCAGATTATATAAGGTTCCTGTACCTAAAGACATTTCAAGGTTAGGGTGACTTCCC
ACAATACATAGCGACATGCAAATATAGCGGGGCGTGCCTCCCCTGTCCCTTGTGGGCGTCTTCTCGCTAGGACGC
ACGCGCGCTGCGTGTTCCCGCCTTGTGACTCTAGGTCGGCGAGTCCTGGGAGAGGGTTGATGACGTCAACATTCG
GGCTCC
>H1_247-H1_246
(SEQ ID NO: 1175)
TGCGTAAAATACGCTTCTCGCAGATTATATAAGGTTCCTGTACCTAAAGACATTTCAAGGGTAGGGTGACTTCCC
ACAACACATAGCGACATGCAAATATAGGGTGTGTCTCCCCTGGCCCTTGTGGGCGTCTTCTCGCTAGGACGCACG
CGCGCTGCGTTTTCCCGCCTTCTGGCTCTAGGTCGGCGAGTCCCGGGAAAGGATTGATTACGTCAACATTCGGGC
TTC
>H1_248-H1_247
(SEQ ID NO: 1176)
TGCGTAAAAAAGGCTTCACGCAGATTATATAAGGTTCCTGTACCTAAAGACATTTCAAGGTTAGGGTGACTTCCC
ACAATACATAGCGACATGCAAATATAGGGGGGTGTGTCTCCCCTGGCCCTTGTGGGCGTCTTCTCGCTAGGACGC
ACGCGCGCTGCGTTTTCCCGCCTTGTGACTCTAGGTCGGCGAGTCCTGGGAAAGGATTGATTACGTCAACATTCG
GGCTTC
>H1_248-H1_249
(SEQ ID NO: 1177)
TGCGTAAAAAAGGCTTCACGGTGACTATATAAGGTTCCTGTACCTAATGACATTTCAAGATTAGGGTGACTTCCC
ACAATACATAGCGACATGCAAATAAAGGGGGGTTTCTCGTCTGTCCCCCCTGTGGGCGTCTTCTTGCTAGGACGC
ACGCGCGCTGCGTTTTCCCGCCTTGTGATTCTGGGTCGGCAAGTCCTGGGAAAGGATTGATTACGTCAACATTCG
GGCTTC
>H1_250-H1_251
(SEQ ID NO: 1178)
TGAGAAAAAAAGGCCACACGGAGAATATATAAGGCTCCCATATCTGAAGACATTTTAAGATTAGGGTGATTTCCC
ACAATACATAGCGACATGTAAATGTAGTGGGGCATGCCTTCCCTGTCCCTTGTGGGCAGCTTCTCGCCAGGACGC
ACGCGCGCTGCGTGTTCCCGCCTTGTGACTAAATTGGCGAGTCTGGGAGGAGACTGATGATGTCAGCATCATCAA
CTTTCCCGCTCC
>H1_251-H1_252
(SEQ ID NO: 1179)
TGAGGGAAGACTGTCGTAGGGAGAATATATAAGGCTCCCATATCGCTAGACATTTTAAGATGAGGGTGATTTCCC
ACAATGCATAGCGACATGTAAATGAAGTGGGGCATGCTTTCCCTGTCCCTTGTGGGCAGCTTCTCGCCAGGACGC
ACGCGCGCTGCGTGTTCCCGCCTTGTGACTAAATTGGCGAGTCTGGGAGGAGACTGATGATGTCAGCATCATCAA
CTTTCCCGCTCC
>H1_253-H1_242
(SEQ ID NO: 1180)
TGGGAAAAAAAGGCTTCACGCAGAATATATAAGGCTCCCATATCTAAAGACATTTCAAGGTTAGGGTGACTTCCC
ACAATACATAGCGACATGCAAATATAGCGGGGCGTGCCTCCCCTGTCCCTTGTGGGCATCTTCTCGCCAGGACGC
ACGCGCGCTGCGTGTTCCCGCCTTGTGACTCTAGGCTGGCGAGTCCCTGGGAGAGGGTTGATGACGTCAGCATCG
TCAACATTCGGGCTCC
>H1_253-H1_250
(SEQ ID NO: 1181)
TGAGAAAAAAAGGCCTCACGCAGAATATATAAGGCTCCCATATCTGAAGACATTTTAAGATTAGGGTGATTTCCC
ACAATACATAGCGACATGTAAATGTAGTGGGGCATGCCTCCCCTGTCCCTTGTGGGCAGCTTCTCGCCAGGACGC
ACGCGCGCTGCGTGTTCCCGCCTTGTGACTAAATTGGCGAGTCTGGGAGGAGATTGATGATGTCAGCATCATCAA
CTTTCCCGCTCC
>H1_253-H1_255
(SEQ ID NO: 1182)
CGCGAGAAAAATTCTTCACGCAGAATATATAAGGATCCCATATCTGAAGACATTTTACGATTACGGTGATTTCCC
ACAACACATAGCGACATGTAAATGTAGTGGGGCATGCCTCCCCTGTCCCTTGTGGGCAGCTTCTCGCCAGAACGC
ACGCGCGGTGCGTGTTCCCGCCTTGTGACTAAGTTGGCGAGTCAGGGAGGAGATTGATGATGTCATCATCGTCAG
CTCACCCGCTCC
>H1_253-H1_256
(SEQ ID NO: 1183)
CGAGAGAAAAAGTCTTCACGCAGAATATATAAGGATCCCATATCTGAAGACATTTTACGATTACGGTGATTTCCC
ACAACACATAGCGACATGTAAATGTAGTGGGGCATGCCTCCCCTGTCCCTTGTGGGCAGCTTCTCGCCAGAACGC
ACGCGCGGTGCGTGTTCCCGCCTTGTGACTAAGTTGGCGAGTCAGGGAGGAGATTGATGATGTCATCATCGTCAG
CTCACCCGCTCC
>H1_253-H1_257
(SEQ ID NO: 1184)
TGAGAAAAAAAGGCCTCACGCAGAATATATAAGGCTCCCATATCTGAAGACATTTTAAGGTTAGGGTGATTTCCC
ACAATACATAGCGACATGTAAATGTAGTGGGGCATGCCTCCCCTGTCCCTTGTGGGCAGCTTCTCGCCAGGACGC
ACGCGCGCTGCGTGTTCCCGCCTTGTGACTAAATTGGCGAGTCTGGGAGGAGATTGATGACGTCAGCATCATCAA
CTTTCCCGCTCC
>H1_253-H1_258
(SEQ ID NO: 1185)
TGAGAAAAAAAGGCCTCACGCAGAATATATAAGGCTCCCATATCTGAAGACATTTTAAGGTTAGGGTGATTTCCC
ACAATACATAGCGACATGCAAATATAGTGGGGCGTGCCTCCCCTGTCCCTTGTGGGCAGCTTCTCGCCAGGACGC
ACGCGCGCTGCGTGTTCCCGCCTTGTGACTAAATTGGCGAGTCTGGGAGGGGATTGATGACGTCAGCATCATCAA
CTTTCCCGCTCC
>H1_253-H1_261
(SEQ ID NO: 1186)
TGGGAAAAAGAGGGCTTCACGCAGAATATATAAGGCTCCCATATCTAAAGACATTTCACGGTTAGGGTGACTTCC
CCCACAATACATAGCGACATGCAAATATCATGGTCCTTCAGCGGGGCGTGCCTCCCCTGTCCCTTGTGGGCATCT
TCTCGCCAGGACACGCACGCGGCGCGCTGCGTGTTCCCGCCTTGTGACTTCTAGGCGGGCGAGTCCCTGGGAGAG
GGTTGGATGACGTCAGCATCGCCAACATTCGGGCTCC
>H1_253-H1_407
(SEQ ID NO: 1187)
TGGGAAAAAAAGGCTTCACGCAGAATATATAAGGCTCCCATATCTAAAGACATTTCAAGGTTAGGGTGACTTCCC
CCACAATACATAGCGACATGCAAATATCATGGTCCTTCAGCGGGGCGTGCCTCCCCTGTCCCTTGTGGGCATCTT
CTCGCCAGGACGCACGCGCGCTGCGTGTTCCCGCCTTGTGACTCTAGGCTGGCGAGTCCCTGGGAGAGGGTTGAT
GACGTCAGCATCGTCAACATTCGGGCTCC
>H1_261-H1_259
(SEQ ID NO: 1188)
CGGGAAAAAAACGGCTTCTGGTGGAAAATATATGAGGCCCATACCTGAAGACCTTTCACGGTTATGGTGACTTCC
CACAATACATAGCGACATGCAAATATAGTGGGGCGTGCCTCCACTGTCCTTTGCGGGCATCGTCTCGCCAGGAAG
CGCGCGCTGCGTGTTCCCGCCTTTTGACTCTAGGCGGGCGAATCCTGGGAGAGGGTTGTTGACGTCAACATTCGG
GCTCC
>H1_261-H1_260
(SEQ ID NO: 1189)
CAAGAGAAAACCGAGCCCTGCTGGAAAATATATGAGGCCCACTCTTCAAGACCTTTTATGGTTATGGTAACTTCC
CATAACACATAGCGACATGCAAATATCGTGGGGTGTGCCTCCACGGTCCTTTGCGGACACCGTCTTGCCCGTAAG
CGCGCTGGGTATTCCCGCCTTCTGACTCTAGGCGGGCGAATCCTAGGAGAGGGTTGTTGACGTCGACATTCGGGC
ACC
>H1_261-H1_264
(SEQ ID NO: 1190)
CAAGAGAGAAACGTGCCCTGCTGGAAAATATATGAGGCCCATTCCTCAAGACCTTTTATGGTTATGGTGACTTCC
CACAACACATAGCGACATGCAAATATCGTGGGGTGTGCCTCCACTGTCCTTTGCGGACACCGTCTTGCCCGTAAG
CGCGCGCTGTGTATTCCCGCCTTTTGACTCTAGGCGGGCGAATCCTGGGAGAGGGTTGTTGACGTCGACATTCGG
GCTCC
>H1_261-H1_265
(SEQ ID NO: 1191)
CAAGAAAGAAACGTCCTCTGGTGGAAAATATATGAGGCCCATTCCTCAAGACCTTTTACGGTTATGGTGACTTCC
CACAACACATAGCGACATGCAAATATCGTGGGGTGTGCCTCCACTGTCCTTTGCGGACACCGTCTTGCCCGTAAG
CGCGCGCTGTGTATTCCCGCCTTTTGACTCTAGGCGGGCGAATCCTGGGAGAGGGTTGTTGACGTCGACATTCGG
GCTCC
>H1_261-H1_268
(SEQ ID NO: 1192)
CAAGAAAGAAACGTCCTCTGGTGGAAAATATATGAGGCCCATTCCTCAAGACCTTTTACGGTTATGGTGACTTCC
CACAATACATAGCGACATGCAAATATCGTGGGGTGTGCCTCCACTGTCCTTTGCGGACACCGTCTTGCCCGTAAG
CGCGCGCTGTGTATTCCCGCCTTTTGACTCTAGGCGGGCGAATCCTGGGAGAGGGTTGTTGACGTCGACATTCGG
GCTCC
>H1_261-H1_269
(SEQ ID NO: 1193)
CAAGAAAGAAACGTGCTCTGGTGGAAAATATATGAGGCCCATTCCTCAAGACCTTTTACGGTTATGGTGACTTCC
CACAACACATAGCGACATGCAAATATCGTGGGGTGTGCCTCCACTGTCCTTTGCGGACACCGTCTTGCCCGTAAG
CGCGCGCTGTGTATTCCCGCCTTTTGACTCTAGGCGGGCGAATCCTGGGAGAGGGTTGTTGACGTCGACATTCGG
GCTCC
>H1_261-H1_270
(SEQ ID NO: 1194)
CGGGAAAAAAACGGCCTCTGGTGGAAAATATATGAGGCCCATACCTGAAGACCTTTCACGGTTATGGTGACTTCC
CACAATACATAGCGACATGCAAATATCGTGGGGCGTGCCTCCACTGTCCTTTGCGGGCATCGTCTCGCCCGGAAG
CGCGCGCTGTGTGTTCCCGCCTTTTGACTCTAGGCGGGCGAATCCTGGGAGAGGGTTGTTGACGTCAACATTCGG
GCTCC
>H1_261-H1_272
(SEQ ID NO: 1195)
TGGGAAAAAGAGGGCTTCACGCGGAATATATAAGGCTCCCATACCTAAAGACCTTTCACGGTTAGGGTGACTTCC
CCACAATACATAGCGACATGCAAATATAGTGGGGCGTGCCTCCCCTGTCCCTTGCGGGCATCTTCTCGCCAGGAC
ACGCGCGCGCCGCGCTGCGTGTTCCCGCCTTTTGACTTCTAGGCGGGCGAATCCTGGGAGAGGGTTGGATGACGT
CCAACATTCGGGCTCC
>H1_261-H1_292
(SEQ ID NO: 1196)
CGGGAAAAAAAGGGCTTCTGGCGGAAAATATATGAGGCCCATACCTGAAGACCTTTCACGGTTATGGTGACTTCC
CACAATACATAGCGACATGCAAATATAGTGGGGCGTGCCTCCCCTGTCCCTTGCGGGCATCTTCTCGCCAGGAAG
CGCGCGCGCTGCGTGTTCCCGCCTTTTGACTCTAGGCGGGCGAATCCTGGGAGAGGGTTGATGACGTCAACATTC
GGGCTCC
>H1_263-H1_271
(SEQ ID NO: 1197)
CAAGAGAGAAACTTGTCGTGCTGGAAAATATATGAGGCCCATTCCTCAGGACCTTTTATGGTTAGGGTGATTTCC
CACAATACATAGCGACATGCAAATATAGTGGGGTGTGCTTCCACTGTCCTTTGCGGACACCGTCTCGCCCGTAAG
CGCGCGCTGTGTATTCCCGCCTTTTGACTCTAGGCGGGCGAATCCTGGGAGAGGGTTGTTGACGTCGACATTCGG
GCTCC
>H1_264-H1_263
(SEQ ID NO: 1198)
CAAGAGAGAAACTTGTCGTGCTGGAAAATATATGAGGCCCATTCCTCAGGACCTTTTATGGTTAGGGTGACTTCC
CACAACACATAGCGACATGCAAATATCGTGGGGTGTGCTTCCACTGTCCTTTGCGGACACCGTCTCGCCCGTAAG
CGCGCGCTGTGTATTCCCGCCTTTTGACTCTAGGCGGGCGAATCCTGGGAGAGGGTTGTTGACGTCGACATTCGG
GCTCC
>H1_266-H1_267
(SEQ ID NO: 1199)
CGAGGAAATAATCTCCCCTGGTGGCAAATATAGGAAGCCCATTCCTCAAGACCTTTTAAGGTTACGGTGACTTCC
CACAATACATAGCAACATGCAAATATTGTGGGGTGTGCCTTCACTGTCCTTTGCGGTCACTGTCTTGCCCATAAG
CGCGCTGTGTAATCCCGCCTTTTGACGTTAGGCAGGCGAATCCTGGGAGAGGGTTGCTGACGTCGACATTCGGCT
CC
>H1_268-H1_266
(SEQ ID NO: 1200)
CAAGGAAGTAACGTCCTCTGGTGGAAAATATATGAGGCCCATTCCTCAAGACCTTTTACGGTTATGGTGACTTCC
CACAATACATAGCAACATGCAAATATCGTGGGGTGTGCCTCCACTGTCCTTTGCGGACACTGTCTTGCCCGTAAG
CGCGCTGTGTAATCCCGCCTTTTGACTCTAGGCGGGCGAATCCTGGGAGAGGGTTGTTGACGTCGACATTCGGCT
CC
>H1_272-H1_273
(SEQ ID NO: 1201)
GGGGAGAAGGCGCTTTCCGCGGATTATATAAGGCTCCAGCACCTAGAGGCCTTTAACAGTTAGGGTGATTTCCCA
CAATGCATAGCGACATGCAAATATAGTTGGGTGTGCTTTCCCTGTTCCTTGCCTGCATCTTCTTGCCTGCGTGTT
CCCGCCTTTTGACTGCAGGCGGGCGAATCCTGGGAGAGAGTTGATGACGTCAACACTCAGGCTCC
>H1_272-H1_274
(SEQ ID NO: 1201)
GGGGAGAAAGGGGCTTCACGCGGAATATATAAGGCTCCCGTACCTAAAGGCCTTTCACGGTTAGGGTGACTTCCC
CACAATACATAGCGACATGCAAATATAGTTGGGCGTGCCTCCCCTGTCCCTTGCGGGCATCTTCTCGCCAGGACA
CGCGCGCGCCGCGCTGCGTGTTCCCGCCTTTTGACTTCCAGGCGGGCGAATCCTGGGAGAGGGTTGGATGACGTC
CAACATTCGGGCTCC
>H1_274-H1_291
(SEQ ID NO: 1202)
GGGGAGAAAGGGGCTTCACGGCGAATATATAAGGCTCCCGTACCTAAAGGCCTTTCACGGTTAGGGTGACTTCCC
CACAATACATAGCGACATGCAAATATAGTTGGGCGTGCCTCCCCTGTCCCTTGCGGGCATCTTCTCGCCCGGACA
CGCGCGCGCCGCGCTGCGTGTTCCCGCCTTTTGACTTCCAGGCGGGCGAATCCTGGGAGAGGGTTGGATGACGTC
CAACATTCGGGCTCC
>H1_276-H1_280
(SEQ ID NO: 1203)
AGGAAGGGAGCCTCACACGGCGGCTATATAAGGCCCCCTGCCCTGTAGGCCTTTCACAGTTAGGGCGACTTCCCC
ACAACACATAGCGACATGCAAATGTGGATGGGCGTGCCTCCCCGGTCCCTGCCGGCAACTTCTCTCCGGGACGCG
CGCTCGCGCTGAGTGTTCCCGCCTTTTGACGCCAGCGGAGCGAATCCGGGGAGCGGGCGGATGACGTCAACAGTG
CGGCTCC
>H1_279-H1_276
(SEQ ID NO: 1204)
AGGAAGGGAGCCTCACACGGCGGCTATATAAGGCCCCCTGCCCTGTAGGCCTTTCACAGTTAGGGCGACTTCCCC
ACAACACATAGCGACATGCAAATGTAGATGGGCGTGCCTCCCCGGTCCCTGCCGGCAACTTCTCTCCGGGACGCG
CGCTCGCGCTGAGTGTTCCCGCCTTTTGACGCCAGCCGAGCGAATCCGGGGAGCGGGCGGATGACGTCAACAGTG
CGGCTCC
>H1_280-H1_277
(SEQ ID NO: 1205)
AGGAAGGGAGCCTCACACGGCGGCTATATAAGGCCCCCTGCCCTGTAGGCCTTTCACAGTTAGGGCGACTTCCCC
ACAACACATAGCGACATGCAAATGTGGATGGGCGTGCCTCCCCGGTCCCTGCCAGCAACTTCTCTCCGGGACGCG
CGCTCGCGCTGAGTGTTCCCGCCTTTTGACGCCAGCGGAGCGAATCCGGGGAGCGGGCGGATGACGTGAACAGTG
CGGCTCC
>H1_282-H1_279
(SEQ ID NO: 1206)
GGGAAGAGAGCCTCACACGGCGGCTATATAAGGCCCCCTTACCTATAGGCCTTTTACGGTTAGGGTGACTTCCCC
ACAACACATAGCGACATGCAAATTTAGATGGGCGTGCCTCCCCTGTCCCTGTGGGCAACTTCTCTCCGGGACACG
CGCGCTCGCGCTGAGTGTTCCCGCCTTTTGACTTCCAGCCGAGCGAATCCTGGGAGAGGGCAGATGACGTCAACA
GTCAGGCTCC
>H1_282-H1_281
(SEQ ID NO: 1207)
GGGAAGAGGGCCTCACACGAGGGCTATATAAGGCCCCCTTACCTATAGGCCTTTTACGGTTAGAGTGACTTCCCA
CAACACCTAGCGACATGCAAATTTAGATGGGCGTGCCTCCTCTGTCCCTGTGGCAACACCTCTCCGGGACGCGCG
CTCGCTCTGAGTGTTCCCGCCTTTTGACTTCCAGCCGAACGAATCCTGGGAGAGGGCAGATGACGTCAATAGTCA
GGCTCC
>H1_282-H1_283
(SEQ ID NO: 1208)
GGGAAGAGGGCCTCACACGAGGGCTATATAAGGCCCCCTTACCTATAGGCCTTTTATGGTTAGAGTGACTTCCCA
CAACACCTAGCGACATGCAAATTTAGATGGGCGTGCCTCCTCTGTCCCTGTGGCAACACCTCTCCGGGACGCGCG
CTCGCTCTGAGCGTTCCCGCCTTTTGACTTCCAGCCGAACGAATCCTGGGAGAGGGCAGTGACGTCAATAGTCAG
GCTCC
>H1_282-H1_284
(SEQ ID NO: 1209)
GGGAAGAGAGCCTCACACGGCGGCTATATAAGGCCCCCTTACCTATAGGCCTTTTACGGTTAGGGTGACTTCCCA
CAACACATAGCGACATGCAAATTTAGATGGGCGTGCCTCCCCTGTCCCTGTGGGCAACTTCTCTCCGGGACACGC
GCGCTCGCGCTGAGTGTTCCCGCCTTTTGACTTCCAGCCGAGCGAATCCTGGGAGAGGGCAGATGACGTCAACAG
TCAGGCTCC
>H1_285-H1_282
(SEQ ID NO: 1210)
GGGAAGAGAGGCCTACACGGCGGCTATATAAGGCCCCCTTACCTATAGGCCTTTTACGGTTAGGGTGACTTCCCC
ACAACACATAGCGACATGCAAATTTAGATGGGCGTGCCTCCCCTGTCCCTGTGGGCAACTTCTCTCCGGGACACG
CGCGCTCGCGCTGAGTGTTCCCGCCTTTTGACTTCCAGCCGAGCGAATCCTGGGAGAGGGCAGATGACGTCAACA
GTCAGGCTCC
>H1_287-H1_285
(SEQ ID NO: 1211)
GGGAAGAGAGGCACTACACGGCGGCTATATAAGGCCCCCTTACCTATAGGCCTTTTACGGTTAGGGTGACTTCCC
CACAACACATAGCGACATGCAAATTTAGATGGGCGTGCCTCCCCTGTCCCTGTGGGCAACTTCTCTCCGGGACAC
GCGCGCTCCGCGCTGAGTGTTCCCGCCTTTTGACTTCCAGCCGAGCGAATCCTGGGAGAGGGCAGATGACGTCCA
ACAGTCAGGCTCC
>H1_287-H1_288
(SEQ ID NO: 1212)
GGGAGAAGGGGGAGTACACGGCGGATATATAAGGCCCCCTTATGTATAGTCCTTTTACGGTTAGGGTGACTTCCC
ACAACGCATAGCGACATGCAAATTTGACGGGCGTGCCTCCTCTGTCCCTGCGGGCAACTTCTCTCCTGGACGCGC
GCTCCGCGCTGCGTGTTCCCGCCTTTTGACTCCAGCCGAGCGAATCCTGGGAGAGGGCAGGTGACGTCCAACAGT
CAGGCTCG
>H1_287-H1_290
(SEQ ID NO: 1213)
GAGAGAGGCTGTGCACACGGCGGATATATAAGGCCCCCTTATGTATAATCCTTTACCGGTTAGGGTGACTTCCCA
CAACGCATAGCGACATGCAAATTTGACGGGCGTGCCTCCTCTGTCCCTGCGGGCAACTTCTCTCCTGGACGCGCG
CTCCGCGCTGCGTGTTCCCGCCTTTTGACTCCAGCCGAGCGAATCCTGGGAGAGGGCAGGTGACGTCCAACAGTC
AGGCTCG
>H1_288-H1_289
(SEQ ID NO: 1214)
GGGAGAAGGGGGAGTACACGGCGGATATATAAGGCCCCCTTATGTATAGTCCTTTTACGGTTAGGGTGACTTCCC
ACAACGCATAGCGACATGCAAATTTGACGGGCGTGCCTCCTCTGTCCCTGCGGGCAACTTCTCTCCTGGACGCGC
GCTCGCGCTGCGTGTTCCCGCCTTTTGACTCCAGCCGAGCGAATCCTGGGAGAGGGCAGGTGACGTCAACAGTCA
GGCTCG
>H1_291-H1_287
(SEQ ID NO: 1215)
GGGAAGAGAGGCACTACACGGCGGCTATATAAGGCCCCCTTACCTATAGGCCTTTTACGGTTAGGGTGACTTCCC
CACAACACATAGCGACATGCAAATTTAGATGGGCGTGCCTCCCCTGTCCCTTGTGGGCAACTTCTCTCCGGGACA
CGCGCGCTCCGCGCTGAGTGTTCCCGCCTTTTGACTTCCAGCCGAGCGAATCCTGGGAGAGGGCAGGATGACGTC
CAACAGTCAGGCTCC
>H1_294-H1_295
(SEQ ID NO: 1216)
TAGAAAAAATCGTAGTTTATGCTGGATTTATAAGATTCCCACATCTAAAGCCATTTCACAGTTACGGTGAACTTC
CCACTACACACGGCGATATGCAAATATAGCGGAAGTGTTCCTGAGGCGTGGTAAAGCGCGCGCGCGCTGAGAGTT
CCCGCCCTGTGGTGCTGGGCTGGAGATGCCTGAGAACTGGCTGATGACGGCAACGTTCGGGCTCC
>H1_295-H1_296
(SEQ ID NO: 1217)
TAGAAAAAATCGTGCCTATGCTGGATTTATAAGATTCCCACATCTAAAGCCATTTCTCAGTTACGGTGAACTTCC
CACTACACACGGCGATATGCAAATATAGCGGAAGTGTTCCTGAGGCGTGGTAAAGCGCGCGCGCGCTGAGAGTTC
CCGCCCTGTGGTGCTGGGCTGGAGATGCCTGAGAACTGGCTGATGACGGCAACGTTCGGGCTCC
>H1_296-H1_297
(SEQ ID NO: 1218)
TAGAAAAAATCGTGCCTACGCTGGATTTATAAGATTCCCACATCTAAAGCCATTTCTCAGTTACGGTGAACTTCC
CACTACACACGGCGATATGCAAATATAGCGGAAGTGTTCCTGAGGCGTGGTAAAGCGCGCGCGCGCTGAGAGTTC
CCGCCCTGTGGTGCTGGGCTGGAGATGCCTGAGAACTGGCTGATGACGGCAACGTTCGGGCTCC
>H1_298-H1_294
(SEQ ID NO: 1219)
TAGAAAAAATGGTAGTTTATGCGGGATTTATAAGACTCCCACATCTAAAGCCATTTCACAGTTACGGTGACTTCC
CCACAACACACGGCGATATGCAAATATAGCGGAAGTGTTCCTGAGGCGTGGTAAAGCGCACGCGCGCTGAGAGTT
CCCGCCCTGTGGTGCTGGGCCCGAGATGCCTGAGAGCGGGCTGATGACGGCAGCGTTTGGGCTCC
>H1_299-H1_298
(SEQ ID NO: 1220)
TAGAAAAAAGGGGAGTTTATGCGGGATTTATAAGACTCCCATATCTAAAGACATTTCACAGTTATGGTGACTTCC
CCACAACACATGGCGATATGCAAATATCGCGGAGCTGGCCCTGAGGCGTGGTAAGGCGCACGCGCGCTGAGAGTT
CCCGCCCTGTGGCGCTGGGCCCGAGATTCCTGAGAGCGGGTTGATGACGGCAGCGTTTGGGCTCC
>H1_299-H1_300
(SEQ ID NO: 1221)
TAGAGAAAAGGGGGTGTTTGCGGGATTTATAAGATTCCCATTGCTAAAGACATTTCACAGTTATGGTGACTTCCC
ACAACACTTGGCGATATGCAAATATCACGGAGTTGGCCCTGAGGCGCGGCGAGACGCACGCGCGCTGAGAGTTCC
CGCCTTCTCACCCTGGGTCCAAGGTTCCTGAAGGCGGGTTGAAGACTGCAGTGTTTGGGCGCC
>H1_301-H1_299
(SEQ ID NO: 1222)
TAGGAAAAAGGGGGGTTTATGCAGGATTTATAAGACTCCCATATCTAAAGACATTTCACGGTTATGGTGACTTCC
CCACAACACATAGCGATATGCAAATATCGCGGAGCGGGCCCTGAGGCGTGGTCAGGCGCACGCGCGCTGCGAGTT
CCCGCCCTGTGGCGCTGGGCCCGAGATTCCTGAGAGCGGGTTGATGACGTCAGCGTTTGGGCTCC
>H1_301-H1_302
(SEQ ID NO: 1223)
TAGGAAACGCGCATTTTAGGCAGGATTTATAAGACACCCATATCTAAAGACATTTCACGGTTATGGTGACTTCCC
ACAACACATAGCGAAATGCAAATATGTGGAGCAGGCGCTGAGGCGTGGTCGGGCGCACGCGCGCTGCGAGTTCCC
GCCCTTCGGCGCTAGGCCCGAGATGCCTGAGAGCTGGTTGATCACGTCTGCGTTTGGACTCA
>H1_301-H1_303
(SEQ ID NO: 1224)
TAGGAAAAGAGCATTTTAGGCAGGATTTATAAGACACCCATATCTAAAGACATTTCACGGTTATGGTGACTTCCC
ACAACACATAGCGAAATGCAAATATGTGGAGCGGGCGCTGAGGCGTGGTCGGGCGCACGCGCGCTGCGAGTTCCC
GCCCTTCGGCGCTAGGCCCGAGATTCCTGAGAGCTGGTTGATGACGTCAGCGTTTGGACTCC
>H1_304-H1_253
(SEQ ID NO: 1225)
TGGGAAAAAGAGGGGCTTCACGCAGCATTTATAAGGCTCCCATATCTAAAGACATTTCACGGTTAGGGTGACTTC
CCCCACAATACATAGCGACATGCAAATATCATGGTCCTTCAGCGGGGCGTGCCTCCCCCTGTCCCTTGGCCCGTG
GGCATCTTCTCGCCAGGACACGCACGCGGCGCGCTGCGTGTTCCCGCCTTGTGACTTCTAGGCGGGCGAGTCCCT
GGGAGAGGGTTGGATGACGTCAGCATCGCCAACATTCGGGCTCC
>H1_304-H1_293
(SEQ ID NO: 1226)
CGGGAAAAAGACGGGCCTCACGCCGCATTTATAAGGCTCCCATATCTAACGACATTTTACGGTTAGGGTGACTTC
CCACAATACATAGCGATATGCAAATATAGCGGGGCGTGTCTCCCCCTGGCCCTTGGCTCGTGGGCATCGTCTCGC
CAGGACGCATGCGCGCTGCTTGTTCCCGCCTTGACTACTTGCTAGTCCTGGGAGAGGGTTGATGACGTCAACGTT
CAGACTCC
>H1_304-H1_311
(SEQ ID NO: 1227)
CCGGCATAAGACGGGCCTCACGGCGCACTTATAAGGATCCCATATCTAACGACATTTTACGGTTAGGGTGACTTC
CCACAATACATAGCGATATGCAAATATAGCGGGGCGTGTCTACTCCTGGCCCTTGGTTTGTGGGCGTCGTCTCGC
CAGGACGCATGCGCACTGCTTGTTCCCGCCTTGACTACTTGCTAGTCCTGGGAGAGGGTTGATGACGTCAACGTT
CAGACTCC
>H1_306-H1_307
(SEQ ID NO: 1228)
TCAGCGTAAAGGAGTGCGTACAAAGAATTTATAAGGCTCGCATAGCTCTAGCTGCTTCACAGTTAGGGTGACTTC
CCACAAGCCATAGCGCATGTAAATATAAGGGCGTTTGTTCCCCCGCCCCCGTCCAGGCTGCAGCATCTCTCCAGG
ACGCAGGCGCACTGAGCCTTCCCGCCCGGTCACTCCAGACCCGCCATTCCCGGGCCAGGTTAATGACGTCACACT
TAAGCTCC
>H1_306-H1_310
(SEQ ID NO: 1229)
TCAGCGTAAAGGGATGCTTACGTAGAATTTATAAGGCTCCCATACCTAAAGCCATTTCACGGTTAGGGTGACTTC
CCACAAGACATAGCGACATGCAAATATAGAGGGGCGTGCTTCCCCTGTCCCGTCCCGTAGGCGTCTTCTCGCCAG
GGACGCACGCGCGCTGCGCCCTGTTCCCGCCCTGTCACTAGGGATTCTGGGCCGGCCATTCCCCGGGCGCAGGTT
GATGACGTCACGTTTGGGCTCC
>H1_308-H1_309
(SEQ ID NO: 1230)
TCAGCGTAAAAGAATGCTTAGCTAGAATTTATAAGGCTCCCAGACCTAAAGCCATATCTCGGTTAGGGTGACTTC
CCACAAGACATAGCGACATGCAAATATAGAGGGGGGGGCTTCCCCTGTGCCTTGTAGGCGTCTTCTCACGAAGTC
GCAAGCGCGTTGCGCCCTGTTCCCGCCCTGTCACTATTGATTATTGGCCGACCTTTCCTCGGGCGGAGTCTGATG
ACGTCATCGGTTCC
>H1_310-H1_308
(SEQ ID NO: 1231)
TCAGCGTAAAGGAATGCTTACCTAGAATTTATAAGGCTCCCAGACCTAAAGCCATATCACGGTTAGGGTGACTTC
CCACAAGACATAGCGACATGCAAATATAGAGGGGGGGGCTTCCCCTGTGCCTTGTAGGCGTCTTCTCACGAAGGA
CGCACGCGCGCTGCGCCCTGTTCCCGCCCTGTCACTATTGATTATTGGCCGACCATTCCCCGGGCGCAGTCTGAT
GACGTCATTCGGTTCC
>H1_312-H1_313
(SEQ ID NO: 1232)
TGGGGGAAGCTGGGCTCGATCAGCCTTTATAAAGCTCCAAAAACTCAAGACATTTTTCCGTTACGGTGGCTTCCC
ACAGTACACAGCGACATGCAAATAGCTTGCCAATGAATTCGCGGACCGCTTCCCGCCCCGGCGCAGGCGCGCGGA
CGCTGTCTCCCCTGGACGCGCGCTCGCGGTTCCCGGGAGCTGGCTGATGACGTTCGGTCTCC
>H1_312-H1_314
(SEQ ID NO: 1233)
TGGGGAAAGGTGGGCTCAAGCAGACTTTATAAAGCTCCAAAAACTCAAGACATTTTTCCGTTACGGTGGCTTCCC
ACAATACACAGCGACATGCAAATATAGTGGAGTGTGCTTGCCAATGATTTCCCGGGCCGCTTCTCGCCACGGCGC
AGGCGCGCTGTGTGTTCCCGCCCTGGACGGGCGCGCCCGCGGTTCCCGGGAGCGGGTTGATGACGTTCGGTCTCC
>H1_314-H1_315
(SEQ ID NO: 1234)
TGGGGAGTGGTGGATCCAAGCAGACTTTATAAAGCTCCGAAGGTCCAAGGCATCTTTCCCTTACGGTGGCTTCCC
ACAAGACATAGCGATATGCAAATTTATCGATACGTGCTTCAGACGCGCTTCTCGCCGCAGCGCAAGCGCGCTGTG
TGCTGACGCGGGGGACGGGCCAGTGCGCGATTCCCGGGAGCGGGTTGATGACGTTCGATCTCC
>H1_317-H1_316
(SEQ ID NO: 1235)
TGGGGAGAGGTGGATCCGAACAGACTTTATAAAGCTCCGAAAGCCCAAGGCATCTTTCCCTTACGGTAGCTTCCC
ACAAGACATAGCGACATGCAAATTTCTTGAAGTATGCTTCAGACGCGCTTCTCGCCACAGCGCAAGCGCGCTGTG
TGCTGACGCGGGAACGGGCCAGTGCGCGGTTCCCGGGAGCGGGTTGATGACGTTAGATCTCC
>H1_318-H1_317
(SEQ ID NO: 1236)
TGGGGAGAGGTGGATCCAAACAGACTTTATAAAGCTCCGAAAGCCCAAGGCATCTTTCCCTTACGGTGGCTTCCC
ACAAGACATAGCGACATGCAAATTTATTGAAGTATGCTTCAGACGCGCTTCTCGCCGCAGCGCAAGCGCGCTGTG
TGCTGACGCGGGAGACGGGCCAGTGCGCGGTTCCCGGGAGCGGGTTGATGACGTTCGATCTCC
>H1_322-H1_319
(SEQ ID NO: 1237)
TTCAGGGTGTAGACCGGCCGCCACTATAAGGCTCGAAAGAGGAATAAATTTTTCGTTTAGGGTGATTTCCCACAA
AGCACAGCGCGTAATTTGCATGTGCTCTACCCCAGGCTCCTGTGCTAGACAAGAAGCCCGCGCATCCGGGCAAGG
GATGATGACGTCGTCCTTCAAGAGCG
>H1_322-H1_321
(SEQ ID NO: 1238)
TTCAGGGTGTAGACCGGCCGCCACTATAAGGCTCGAAAGAGGAATAAATTTTTCGTTTAGGGTGATTTCCCACAA
AGCACAGCGCGTAATTTGCATGTGCTCTATCCCAGGCTCCTGTGCCAGACAAGAAGCCCGCGCATCCGGGCAAGG
GATGATGACGTCGTCCTTCAAGAGCG
>H1_322-H1_323
(SEQ ID NO: 1239)
TTCAGTGTGTAGACCGGCCGCCACTATAAGGTTCGAAAGAGGAATAAATTTTTCGTTTAGGGTGATTTCCCACAA
AGCACAGCGCGTAATTTGCATGTGCTCTACCCCAGGCTCCTGTGCTAGACAAGAAGCCCGCGCATCCGGGCAAGG
GATGATGACGTCGTCCTTCAAGAGCG
>H1_325-H1_327
(SEQ ID NO: 1240)
TGGAGGGTGTAGACCGGCCGCCACTATAAGGCTCGAAAGAGGAATAAATTTTTCGCTTACGGTGACTTCCCACAA
AGCACAGCGCGTAATTTGCATGTGCTCTATCCCAGGCTTCCTGTTCCAGACAAGAAGCCCGCGCATCCGGGCAAG
GGATGATGACGTCATCCCCGTCCTTCAAGCGCG
>H1_328-H1_329
(SEQ ID NO: 1241)
TGGAAGGTGGAGACCTGCCGCCATAATAAGACTCCAAAAGAGAGTGAATTTAACACTTACGGTGACTTCCCACAA
AGCACAGCGTGTAATTTGCATGCGCTCTAGCCCAGGCTCCAGCTCCGGACGAGAAGCCCGCGCATCCCGGCAAAG
GATGATGACGTCGTCCTTCAAGCGCT
>H1_328-H1_332
(SEQ ID NO: 1242)
TGGAGGGTGGAGACCGGCCACCATTATAAGACTCCAAAGCGGAATAAATTTTACGCTTATGGTGACTTCCCACAA
AGCACAGCGCGTAATTTGCATGTGCTCTATCCCAGGCTTCCTGCTCCAGACAAGAAGCCCGCGCATCCGGGCAAG
GGATGATGACGTCATCCCCGTCCTTCAAGCGCG
>H1_330-H1_328
(SEQ ID NO: 1243)
TGGAGGGTGGAGACCGGCCACCATTATAAGACTCCAAAGCGGAATAAATTTTACGCTTATGGTGACTTCCCACAA
AGCACAGCGCGTAATTTGCATGTGCTCTATCCCAGGCTTCCTGCTCCAGACAAGAAGCCCGCGCATCCGGGCAAG
GGATGATGACGTCATCCCCGTCCCTCAAGCGCG
>H1_332-H1_325
(SEQ ID NO: 1244)
TGGAGGGTGGAGACCGGCCACCATTATAAGACTCGAAAGCGGAATAAATTTTACGCTTATGGTGACTTCCCACAA
AGCACAGCGCGTAATTTGCATGTGCTCTATCCCAGGCTTCCTGCTCCAGACAAGAAGCCCGCGCATCCGGGCAAG
GGATGATGACGTCATCCCCGTCCTTCAAGCGCG
>H1_332-H1_333
(SEQ ID NO: 1245)
TACAGGGTGGAGATCGGCGAAAATTATAAGACTCGAAAGCGGCATAAAGTTTAAGCTTATGGTGACTTCCCACAA
AGCACAGCGCGTAATTTGCATGTGCTTTATCCCAGGCTCTTTCTCCAGACCAGTAGCCTGCACATCCGGGCAAGG
GGTGATGACGTCGTCCATCAAGCGCG
>H1_334-H1_330
(SEQ ID NO: 1246)
GGGAAGGTGGAGACCGGCCACCATTATAAGACTCCAAAGCGGAATACATTTTTCGGTTATGGTGACTTCCCACAA
AGCACAGCGCGTAATTTGCATGCGCTCTATCCCAGGCTTCCTGCTCCAGACAAGAAGCCCGCGCATCCGGGCAAG
GGATGATGACGTCATCCCCGTCCCTCAAGCGCG
>H1_335-H1_337
(SEQ ID NO: 1247)
ACGGCGGTGTGGAGGGCGAACTTTATAAGCCTCCGAAGAGAAAGCGATTTTTCAGTTATGGTGGTTTCCCACAAG
GCACAGCGCACAGTTTATTTGCATGCGCTCTAGCCCCGGCTCCCGCTCCAGACTAAGAAGCCCGCGCATTTCGGC
TGCGGATGATGACGTCGGGCCTCAAGCGCC
>H1_336-H1_335
(SEQ ID NO: 1248)
ACGGCGGTGTGGAGGGCGAACTTTATAAGCCTCCGAAGAGAAAGCGATTTTTCAGTTATGGTGGTTTCCCACAAG
GCACAGCGCACAGTTTATTTGCATGCGCTCCCGCCGCTTCTAGCCCCGGCTCCCGCTCCAGACTAAGAAGCCCGC
GCATTTCGGCTGCGGATGATGACGTCGGGCCTCAAGCGCC
>H1_338-H1_334
(SEQ ID NO: 1249)
GGGGAGGTGTGGGCCGGCCAGCTTTATAAGACTCCAAAGCGGAATGCATTTTTCAGTTATGGTGGCTTCCCACAA
GGCACAGCGCGCTGCTTATTTGCATGGGCTCACGCCGCTTCTAGCCCGGGCTTCCTGCTCCAGACTAAGAAGCCC
GCGCATCCCGGCCGGGCGAGGGATGATGACGTCATCCCCAGCCCTCAAGCGCG
>H1_338-H1_340
(SEQ ID NO: 1250)
GGAGGGCGGTGGCCGGCGAGCTTAATAAGCCTCGGAGGCGGGACGCCTGTTACAGTGACGGTGGTTTCCCACAAA
GCACGGCGCGGCGGTCTTGATTTGCATGCGCCTTTATGCCCGCCTCCCGCTCCGGAGAAGAAGCCCGCGCATCCC
GGCTGGGCTGGGGGTGATGACGTCAGGGCTCGAGCGCC
>H1_338-H1_342
(SEQ ID NO: 1251)
GGAGAGCGGTGGCCGGCGAGCTTAATAAGCCTCGGAAGCGGAACGCATTTTACAGTGATGGTGGTTTCCCACAAG
GCACAGCGCGGCGGCCTTTATTTGCATGCGCTTCTATTCCCGCCTCCCGCTCCAGAGAAGAAGCCCGCGCATCCC
GGCTCGGCTGGGGATGATGACGTCAGGGCTCGAGCGCC
>H1_338-H1_343
(SEQ ID NO: 1252)
GGGGTGGTGTGGCTGGCGAGCTTAATAAGGCTCCGAAGCGGAATGCATTTTACAGTGATGGTGGTTTCCCACAAG
GCACAGCGCGGCGTTTATTTGCATGCGCTTCTATTCCCGCCTCCCGCTCCAGACAAGAAGCCCGCGCATCCCGGC
TCGGCTGGGGATGATGACGTCAGGGCTCGAGCGCC
>H1_338-H1_344
(SEQ ID NO: 1253)
GGAGAGGGGTGGCCGGCGAGCTTAATAAGCCTCCGAAGCGGAACGCATTTTACAGTGATGGTGGTTTCCCACAAG
GCACAGCGCGGCGTTTATTTGCATGCGCTTCTATTCCCGCCTCCCGCTCCAGAGAAGAAGCCCGCGCATCCCGGC
TCGGCTGGGGATGATGACGTCAGGGCTCGAGCGCC
>H1_338-H1_345
(SEQ ID NO: 1254)
GGGGTGGTGTGGGTGGCGAGCTTTATAAGGCTCCGAAGCGGAATGCATTTTTCAGTTATGGTGGTTTCCCACAAG
GCACAGCGCGCCGTTTATTTGCATGGGCTCCCGCCGCTTCTAGCCCCGGCTCCCGCTCCAGACTAAGAAGCCCGC
GCATCCCGGCCCGGCTGGGGATGATGACGTCAGGCCTCAAGCGCC
>H1_338-H1_351
(SEQ ID NO: 1255)
GGGGAGGTGTGGGCGGCGAGCTTTATAAGACTCCAAAGCGGAATGCATTTTTCAGTTATGGTGGTTTCCCACAAG
GCACAGCGCGCTGCTTATTTGCATGGGCTCACGCCGCTTCTAGCCCGGGCTCCCGCTCCAGACTAAGAAGCCCGC
GCATCCCGGCCGGGCAGGGGATGATGACGTCAGCCCTCAAGCGCG
>H1_340-H1_341
(SEQ ID NO: 1256)
GCAAAGCGGTGGCCGGCGAGCTTAATAAGCCTCGGAGGCGGGACGCCTGTTACAGTGACGGTGGTTTCCCACAAA
GCACGGCGCGGCGGTCTTGATTTGCATGCGCCTTTATGCCCGCCTCCCGCTCCGGAGAAGAAGCCCGCGCATCCC
GGCTGGGCTGGGGGTGATGACGTCAGGGCTCGAGCGCC
>H1_346-H1_338
(SEQ ID NO: 1257)
GGGGAGGTGTGGGCCGGCCAGCTTTATAAGACTCCAAAGCGGAATGCATTTTTCAGTTATGGTGGCTTCCCACAA
GGCACAGCGCGCTGCTTATTTGCATGGGCTCACGCCGCTTCTAGCCCGGGCTTCCTGCTCCAGACTAAAGAAGCC
CGCGCATCCCGGCCGGGCGAGGGATGATGACGTCATCCCCAGCCCTCAAGCGCG
>H1_346-H1_347
(SEQ ID NO: 1258)
GGCGAGGGGTGGGCAGCCACCTTTATAAGACTCCAGAGCCGAATGCATTTCTCAGTTGTGGTGGCTTCCCATGAG
GCACAGCGCGCTATTTGCATGCGCTCTAGCCCGGGCTCCGGCTCTGGAATAAAAAATCCCGCGCATCCGGGTGAG
GGATGACGACGTCACCCTCAAGCGCT
>H1_349-H1_346
(SEQ ID NO: 1259)
GGGGAAGTGGGGGCAGGCCGGCTTTATAAGACTCCAGAGCGGAACGCATTTTTCAGTTATGGTGGCTTCCCACAA
GGCACAGCGCTATGCTTATTTGCATGGGCTCACGCCGCTTCTAGCCCGGGCCCCCTGCTCCAGACAAAAAAGCCC
GCGCATCCCGGCCGGGCGCGGGATGATGACGTCATCCCCAGCCCTCGAGCGCG
>H1_349-H1_348
(SEQ ID NO: 1260)
GAAGAAGTGGGGGAGACCGGCTTTATAAGACTCAGAAGGGAACAAACTTTTCAGTTGCGGTGGCTTCCCACAAGG
CACAGCGCTTTATTTGCATGCGCGCTAACCGGGGCCCCCTACTAAAAAGCCCGCGCATGCCCGGCGCGGGATGAT
GACGTCAGCCCTCGAGCGCG
>H1_349-H1_350
(SEQ ID NO: 1261)
GAAGTCGTGGGGGAGAGCGGCTTTATAAGACTCAGAAGGGAACAAACTTTTCAGTTGCGGTGGCTTCCCACAAGG
CACAGCGCTTTATTTGCATGCGCGCTAACCGGGGCCCCCTACTAAAAAGCCCGCGCATGTCCGGCGCGGGATGAT
GACGTCAGCCCCCGAGCGCG
>H1_352-H1_349
(SEQ ID NO: 1262)
GGGGAAGTGGGGGCAGGCCGGCTTTATAAGACTCCAGAGCGGAACGCATTTTTCAGTTATGGTGGCTTCCCACAA
GGCACAGCGCTATGCTTATTTCCATGGCCCCACCTCAGCATGGAAGCTCACGCCGCTTCTAGCCCGGGCCCCCTG
CTCCAGACAAAAAAGCCCGCGCATCCCGGCCGGGCGCGGGATGATGACGTCATCCCCAGCCCTCGAGCGCG
>H1_352-H1_354
(SEQ ID NO: 1263)
GGGAAGGCGGGGCCGGCGGCGCTAAAAGGCTCCGGGGCGGCCCGGACTTATCAGTTACGGTGGCTTCCCACGAGG
CGCAGCGCCGCTCATTTGCATGGCCCCACCCCAGACGGGAAGCCCGCGCCGCTCATTTGCGTGGCCCCGCCCCAG
ACGGGAAGCCCGCGCTGCTCGGCCGCGGTGGTGACGTCGGCCTCTCGCGCC
>H1_352-H1_356
(SEQ ID NO: 1264)
GGGAAAGCGGGGCCGGCGGCGCTAAAAGACTCCAGGGCGGCCCGGACTTATCAGTTACGGTGGCTTCCCACGAGG
CGCAGCGCCGCTCATTTGCATGGCCCCACCCCAGAAGGGAAGCCCGCGCCGCTCATTTGCGTGGCCCCGCCCCAG
ACGGGAAGCCCGCGCTGCCCGGCCGCGGTGGTGACGTCGGCCTCTCGCGCC
>H1_354-H1_355
(SEQ ID NO: 1265)
GGGAAGGCGGGGCCGGCGGCGCTAAAAGGCTCCGGGGCCGCCCGGACTTCACAGTTACGGTGGCTTCCCACGAGG
CGCAGCGCTGTCATTTGCATGGCCCCGCCCCAGACGGGAAGCCCGCGCTGCTCATTTGCGTGGCCCCGCCCCAGA
CGGGAAGCCCGCGCTGCTCGGCCGCGGTGGTGACGTCGGCCTCTCGCGCC
>H1_357-H1_358
(SEQ ID NO: 1266)
TGAAAGGGGCTCATCACAAGCAGAGTTTATAAGGCTCCCATGTGTACAGCCATTTCTCGGTCATGGTAACTACCC
ACAACACACAGCGATATGCAAATATAGCAGAGAGTGTCTTCCCGCGCGCGCCTGGTCGTCTTCGCGCCGGCGCGC
TGCGTGGAGCGGAACTATGACAGAGACCCTGCGATTCCTGGGAGCTGGCTGATGACGTCAGTGTCTAACCTCC
>H1_357-H1_359
(SEQ ID NO: 1267)
TGAAAGGAACTCATCACAAGCAGAGTTTATAAGGCTCCCATGTGTACAGCCATTTCTCGGTCATGGTAACTACCC
ACAACACACAGCGATATGCAAATATAGCAGAGAGTGTCTTCCCGCGCGCGCCTGGTCGTCTTCGCGCCGGCGCGC
TGCGTGGAGCGGAACTATGACAGAGACCCTGCGATTCCTGGGAGCTGGCTGATGACGTCAGTGTCTAACCTCC
>H1_357-H1_360
(SEQ ID NO: 1268)
TGAAAGGAACTCATCACAAGCAGAGTTTATAAGGCTCCCATGTGTACAGCCATTTCTCGGTCATGGTAACTACCC
ACAACACACAGCGATATGCAAATATAGCAGAGAGTGTCTTCCCGCGCGCGCCTGGTCGTCTTCGCGCCGGCGCGC
TGCGTGGAGCGGAACTGTGACAGAGACCCTGCGATTCCTGGGAGCTGGCTGATGACGTCAGTGTCTAACCTCC
>H1_357-H1_363
(SEQ ID NO: 1269)
TGAAAGGAACTCATCTCAAGCAGAGTTTATAAGGCTCCCATGTGTACAGCCATTTCTCGGTCATGGTAACTACCC
ACAACACACAGCGATATGCAAATATAGCAGAGAGTGTCTTCCCGCGCGCGCCTGGTCGTCTTCGCGCCGGCGCGC
TGCGTGGAGCGGAACTGTGACAGAGACCCTGCGATTCCTGGGAGCTGGCTGATGACGTCAGTGTCTAACCTCC
>H1_357-H1_365
(SEQ ID NO: 1270)
TGAGAGAAAATAAGCTCAAGCAGAACTTATAAGGCTCCCAAATGTACAGACATTTCTCGGTCATGGTAACTACCC
ACAACACACAGCGATATGCAAATATAGCAGAGTGTGCCTCCCCGCTCCCGTCCGGTCGTCTTCTCGCCGGAGCGC
AGGCGCGCTGCGTGGTGCGGGACTGTGACCCTGAGCCTGCGATTCCTGGGAGCGGGCTGATGACGTCAGCGTCTG
ACCTCC
>H1_357-H1_367
(SEQ ID NO: 1271)
TGAGAGAAACTAATCTCAAGCAGAACTTATAAGGCTCCCATATGTACAGACATTTCTCGGTCATGGTAACTACCC
ACAACACACAGCGATATGCAAATATAGCAGAGTGTGCCTCCCCGCTCGCGTCCGGTCGTCTTCTCGCCGGAGCGC
AGGCGCGCTGCGTGGTGCGGGACTGTGACCCTGAGCCTGCGATTCCTGGGAGCGGGCTGATGACGTCAGCGTCTA
ACCTCC
>H1_357-H1_368
(SEQ ID NO: 1272)
TGAGAGAAAGTAAGCTGAAGCAGAACTTATAAGGCTCCCAAATCTACAGACATTTCTCGGTCATGGTGACTACCC
ACAACACACAGCGATATGCAAATATCGCGGGGTGTGCCTCCCTGCTCTCGTCCGGTCGTCTTCTCGCCAGGGCGC
AGGCGCGCTGCGTGGTCCGGGCCTGTGACCCTGAGCCCGCGATTCCTGGGAGCGGGTTGATGACGTCAGCGTTTG
ACCTCC
>H1_357-H1_374
(SEQ ID NO: 1273)
TGGGAGAAAGTGGGCTGAAGCAGAACTTATAAGGCTCCCAAATCTAAAGACATTTTTCGGTCATGGTGACTTCCC
ACAACACACAGCGATATGCAAATATCGCGGGGTGTGCGCCTCCCTGCTCTCGTCCAGTCGTCTTCTCGCCAGGGC
GCACGCGTACTAGCGCGCTGCGTTGTTCCCGGCCTGTGACAGAGCCTGAGCCCGCGATTTCCTGGGAGCGGGTTG
ATGACGTCAGCGTTTGAACTCC
>H1_357-H1_395
(SEQ ID NO: 1274)
TGGGAGAAAGTGGGCTGAAGCAGAACTTATAAGGCTCCCAAATCTAAAGACATTTTTCGGTCATGGTGACTTCCC
ACAACACACAGCGATATGCAAATATCGCGGGGTGTGCGCCTCCCTGCTCTCGTCCAGTCGTCTTCTCGCCAGGGC
GCACGCGCGCTGCGTGTTCCCGGCCTGTGACCCTGAGCCCGCGATTCCTGGGAGCGGGTTGATGACGTCAGCGTT
TGAACTCC
>H1_363-H1_364
(SEQ ID NO: 1275)
TGAAAGGGACTCCTCTCAAGCAGAGTTTATAAGGCTCCCATGTGTACAGCCATTTCTCGGTCATGGTAACTACCC
ACAACACACAGCGATATGCAAATATAGCAGAGAGTGTCTTCCCGCGCGCGCCTGGTCGTCTCGGCGCCGGCGCGC
TGCGTGGGGCGGAACTGTGACAGAGACCCTGCGATTCCTGGGAGCTGGCTGATGACGTCAGTGTCTAACCTCC
>H1_364-H1_361
(SEQ ID NO: 1276)
TGAAAGGGACTCCTCTCAAGCAGAGTTTATAAGGCTCCCATGTGTACAGCCATTTCTCGGTCATGGTAACTACCC
ACAACACACAGCGATATGCAAATATAGCAGAGAGTGTCTTCCCGCGCGCGCCTGGTCGTCTCGGCGCCGGCGCGC
TGCGTGGGGCGGAACTGTGACAGAGACCCTGCGATTCCTGGGAGCTGGCTGATGACATCAGTGTCTAACCTCC
>H1_365-H1_366
(SEQ ID NO: 1277)
TGAGGGAAGATAAGCTCAAGCAGAACTTATAAGGCTCCCAAATGTACAGACATTTATCGGTCATGGTAACTACCC
ACAACACACAGCGATATGCAAATATAGCAGAGCGTGCCTCCTGCACGGGCCGGTCGTCTTCTCGCCGGAGCGCAG
GCGCGCTGCGTGGTGCGGGACTGTGACCCTGAGCCTGCGATTCCTGGGAGCGGGCTGATGACGTCAGCGTCTGAG
CTCC
>H1_369-H1_396
(SEQ ID NO: 1278)
TGGGAGAAAGTGGGCTGAAGCAGGACTTATAAGGCTCCCAAATCTAAAGACATTTTTTGGTCATGGTGACTTCCC
ACAACACACAGCGTCATGCAAATATCATGGGGTGTGCGCCTCCCTGCTCCCGTCCAGTCGTCTTCTCGCCAGGGC
GCACGCGCGCTGCGTGTTCCCGGCCTGTGACCCTGAGCCCGCGATTGCTGGGAGCGAGTTGATGACGTCAGCGTT
TGAACTCC
>H1_371-H1_372
(SEQ ID NO: 1279)
TGGGGAAAGCTGGGCTCAAGCAGAGCTTATAAGGCTCTCGTACCTAAAGACATTTCACGGTCATGGTGACTACCC
ACAACACACAGCGACATGCAAATTTCGTGGAGTGTGCCTCCCTCCGCTTGTCCCGCGTCTTTTCTCTCCCGGGCG
CACGCGCGCACGCACGCGACGCGTTCCCGCCACAGCGCCCCCGCGGTTCCTGGGAGCGGGTTGATGACGTCAGCA
TTTGGACGCC
>H1_374-H1_373
(SEQ ID NO: 1280)
TGAAAGAAACTAGCCACAAACGGAAACTATAAGAGGTCCAAAGCTCAGTGTACTCTATGGTTAGGGTGACTTCCC
ACAATACATAGCGATATGCAGATTTCTTCCCCAATCTGGCCCGCCGGGCCCTCCCTAGAGCGCATGCGCTGCAGG
TCCACGGCAGAGCACTGGGCGGGCGATCCCGGGAGCGGGTTGATGACGTCAGCGTTTGAACTCC
>H1_374-H1_375
(SEQ ID NO: 1281)
TGAAAGAAACTAGCCACAAACGGAAACTATAAGAGGTCCAAAGCTCAGTGTACTCTATGGTTAGGGTGACTTCCC
ACAATACATAGCGATATGCAGATTTCTTCCCCAGTCTGGCCCGCTGGGCCCTCCCTAGAGCGCATGCGCTGCAGG
TCCACGGCAGAGCACTGGGCGGGCGATCCCGGGAGCGGGTTGATGACGTCAGCGTTTGAACTCC
>H1_374-H1_376
(SEQ ID NO: 1282)
TGAAAGAAACTAGTTACAAACGGAAACTATAAGAGGTCCAAAGCTCAGTGTACTTTATGGTCAGGGTGACTTCCC
ACAATACATAGCGATATGTAGATTTCTTCCCCGATCTGGGCCCGCCGGGTCCTCCCTAGAGCGCATGCGCTGCAG
GTCCACGGCAGAGGACTGGGCGGGCGATTCCCGGGAGCGGGTTGATGACGTCAGCGTTTGAACTCC
>H1_374-H1_391
(SEQ ID NO: 1283)
TGAGAGAAAATGGTTTGAAGCAGAACTTATAAGAATCCCAAATCTCAGTATATTTTTTGGTCATGGTGACTTCCC
ACAATACACAGCGATATGTAGATATCGCGGGGAGCACCTCCCAGTTCTGGTCCAGTCGGCTCCTCGCTAGGGCGC
ACGCGTACTAGCGCGCTGCATGGTTCCCGGCCTGTGACAGTGCCTGAGCCCGCGATTTCCTGGGAGCGAGTTGAT
GACGTCAGCGTTTGAACTCC
>H1_374-H1_392
(SEQ ID NO: 1284)
TGAAAGAAACTGGTTTCAAACGGAAACTATAAGAGGTCCAAATCTCAGTATACTTTTTGGTCAGGGTGACTTCCC
ACAATACACAGCGATATGTAGATTTCCTCCCCGATCTGGTCCCGTCGGCTCCTCGCTAGGGCGCATGCGCTGCAG
GTCCCCGGCCTATGACTGGGCCGGCGATTTCCCGGGAGCGAGTTGATGACGTCAGCGTTTGAACTCC
>H1_377-H1_378
(SEQ ID NO: 1285)
TGAAAAAAAAGGTTTCAAAGCTACACTTATAAGGCTCCCAAATGTCAGTATATTTTTTGGTCACGGTGACTTCCC
ACAATGCATAGCGATATGTAGATATTGCGAGGAGTACCTCCCAGTTCTGGTCCTGTCAGCTCTTTGCTAGGACGC
ACGCGCTGCAGGTTCCCAGCCTGTGATTGGGCCAGCGATTCCGGGAGCGAATTGATGACGTCAGCGTTTGAACTC
C
>H1_377-H1_380
(SEQ ID NO: 1286)
TGAAAAAAAAGGTTTCAAAGCTACACTTATAAGGCTCCCAAATCTCAGTATATTTTTTGGTCACGGTGACTTCCC
ACAATGCATAGCGATATGTAGATATTGCGAGGAGTACCTCCCAGTTCTGGTCCTGTCAGCTCTTTGCTAGGACGC
ACGCGCTGCAGGTTCCCAGCCTGTGATTGGGCCAGCGATTCCGGGAGCGAATTGATGACGTCAGCGTTTGAACTC
C
>H1_383-H1_377
(SEQ ID NO: 1287)
TGAAAGAAAAGGTTTCAAAGCTACACTTATAAGGATCCCAAATCTCAGTATATTTTTTGGTCACGGTGACTTCCC
ACAATACACAGCGATATGTAGATATCGCGAGGAGTACCTCCCAGTTCTGGTCCTGTCAGCTCTTTGCTAGGGCGC
ACGCGCTGCAGGTTCACAGCCTGTGATTGGGCCCGCGATTCCGGGAGCGAATTGATGACGTCAGCGTTTGAACTC
C
>H1_383-H1_384
(SEQ ID NO: 1288)
TGAAAGAAAAGGTTTCAAAGCTACACTTATAAGGATCCCAAATCTCAGTATATTTTTTGGTCACGGTGACTTCCC
ACAAGACACAGCGATATGTAGATATCGCGAGGAGTACCTCCCAGTTCTGGTCCTGTCAGCTCTTTGCTAGGGCGC
ACGCGCTGCAGGTTCACAGCCTGTGATTGGGCCCGCGATTCCGGGAGCGAATTGATGACGTCAGCGTTTGAACTC
C
>H1_386-H1_383
(SEQ ID NO: 1289)
TGAAAGAAAAAGTTTTGAAGCAGAACTTATAAGAATCCCAAATCTCAGTATATTTTTTGGTCATGGTGACTTCCC
ACAATACACAGCGATATGTAGATATCGCGAGGAGCACCTCCCAGTTCTGGTCCTGTCAGCTCCTCGCTAGGGCGC
ACGCGCGCTGCATGGTTCACAGCCTGTGACCCTGGGCCCGCGATTCCTGGGAGCGAGTTGATGACGTCAGCGTTT
GAACTCC
>H1_386-H1_385
(SEQ ID NO: 1290)
TGAAAGCAAAAGTTTTGAAGCAGAACTTATAAGAAGCCCAAATCTCAGTATATTTTTTGGTCATGGTGACTTCCC
ACAATACACAGCGATATGTAGATATCGCGAGGAGCACCTCCCAGTTCTGGTCCTGTCAGCTCCTCACTAGGGCGC
ATGCGCGCTGCATGGTTCACAGCCTGTGACCCTGGGCCTGCGATTCCTGGGAGCGAGTTGATGACGTCAGCGTTT
GAACTCC
>H1_386-H1_387
(SEQ ID NO: 1291)
TGAAAGCAAAAGTTTTGAAGCAGAACTTATAAGAAGCCCAAATCTCAGTATATTTTTTGGTCATGGTGACTTCCC
ACAATACACAGCGATATGTAGATATCGCGAGGAGCACCTCCCAGTTCTGGTCCTGTCAGCTCCTCACTAGGGCGC
ATGCGCTGCAGGTTCACAGCCTGTGACTGGGCCTGCGATTCCTGGGAGCGAGTTGATGACGTCAGCGTTTGAACT
CC
>H1_388-H1_386
(SEQ ID NO: 1292)
TGAGAGAAAATGTTTTGAAGCAGAACTTATAAGAATCCCAAATCTCAGTATATTTTTTGGTCATGGTGACTTCCC
ACAATACACAGCGATATGTAGATATCGCGGGGAGCACCTCCCAGTTCTGGTCCAGTCGGCTCCTCGCTAGGGCGC
ACGCGTACTAGCGCGCTGCATGGTTCCCGGCCTGTGACAGTGCCTGAGCCCGCGATTCCTGGGAGCGAGTTGATG
ACGTCAGCGTTTGAACTCC
>H1_388-H1_390
(SEQ ID NO: 1293)
TGAGAGAAAATGTTTTGAAGCAGAACTTATAAGAATCCCAAATCTCAGTATATTTTTTGGTCATGGTGACTTCCC
ACAATACACAGCGATATGTAGATATGGTGGGGAGCACCTCCCAGTTCTGGCCCAGTCGGCTCCTCGCTAGGGCGC
ACGCGTACTAGCGCGCTGCGGGTTCCCGGCCTGTGACAGTGCCTGAGCCCGCGATTCCTGGGAGCGAGTTGATGA
CGTCAGCGTTTGAACTCC
>H1_388-H1_393
(SEQ ID NO: 1294)
TAAGAGAAAGTTTTTTGAAGCAGAACTTATAAGGATCCCAAAACTCAGTATATTTTTTGGTCATGGTGACTTCCC
ACAATACACAGCGATATGTAGATATGGTGGGGAGCACCTCCCAGTTCTGGCCCAGTCGGCTCCTCGCTAGGGCGC
ACGCGTACTAGCGCGCTGCGGGTTCCCGGCCTGTGACAGTGCCTGAGCCCGCGATTCCTGGGAGCGAGTTGATGA
CGTCAGCGTTTGAACTCC
>H1_391-H1_388
(SEQ ID NO: 1295)
TGAGAGAAAATGGTTTGAAGCAGAACTTATAAGAATCCCAAATCTCAGTATATTTTTTGGTCATGGTGACTTCCC
ACAATACACAGCGATATGTAGATATCGCGGGGAGCACCTCCCAGTTCTGGTCCAGTCGGCTCCTCGCTAGGGCGC
ACGCGTACTAGCGCGCTGCATGGTTCCCGGCCTGTGACAGTGCCTGAGCCCGCGATTCCTGGGAGCGAGTTGATG
ACGTCAGCGTTTGAACTCC
>H1_393-H1_394
(SEQ ID NO: 1296)
TAAGAGAAAGCTTTCTGAACCAGAGCTTATAAAGATCCCAAAACTCAGGCTATATTTTGGTCATGGTGACTTCCC
ACAATACACAGCGATATGTAGATATAGTGGGGAGCACCTCCCAGTTCTGGCCCAGTCGGGTCCTCTCTAGGGCGC
ACGCGCGCTGCGGGTTCCCGGCCTGTGACAGTGCCTGAGCCCGCGATTCCTGGGAGCGAGTTGACGTCACCGTTT
GAACTTC
>H1_395-H1_369
(SEQ ID NO: 1297)
TGGGAGAAAGTGGGCTGAAGCAGAACTTATAAGGCTCCCAAATCTAAAGACATTTTTCGGTCATGGTGACTTCCC
ACAACACACAGCGATATGCAAATATCATGGGGTGTGCGCCTCCCTGCTCTCGTCCAGTCGTCTTCTCGCCAGGGC
GCACGCGCGCTGCGTGTTCCCGGCCTGTGACCCTGAGCCCGCGATTGCTGGGAGCGAGTTGATGACGTCAGCGTT
TGAACTCC
>H1_398-H1_357
(SEQ ID NO: 1298)
TGGGAAAAAGTGGGGCTCAAGCAGAATTTATAAGGCTCCCAAACCTAAAGACATTTTACGGTTATGGTGACTTCC
CACAACACACAGCGACATGCAAATATCGCGGGGTGTGCGGCCTCCCTGCTCTCGTCCAGGCGTCTTCTCGCCAGG
GCGCACGCGCGCACGCGCGCTGCGCTGTTCCCGCCCTGGTGACGGAGCCTGAGCCCGCGATTTCCTGGGAGCGGG
TTGATGACGTCAGCGTTTGGACTCC
>H1_398-H1_399
(SEQ ID NO: 1299)
CAGGAAAGACTGCGCTGAGGCAGACTTTATAAGGCTCCCGCGCAGAAAGAAACTTTATAGTTATGGTGATTTCCC
ACAAGCCACTGCGTCATGCAAATAAAGCAGGGTTGACGGCTTCCAAGTATGTACCTTAAGGTTTTTCTCTAGGCC
GCGTACGCTCTGCGTATTCAGCCACGTGACCCTGAGCCAGTGGTTGTTGGGAGCACGTTGTGGACCTCTGCGTTT
GGATTCC
>H1_398-H1_400
(SEQ ID NO: 1300)
CAGGAAAGAGTGGGGCTCAGGCAGACTTTATAAGGCTCCCAAACAGAAAGACACTTTACAGTTATGGTGACTTCC
CACAAGACACTGCGTCATGCAAATATCGCAGGGTTGGCGGCCTTCCTTCTATCTTCCTTAAGGTTTCTCTCTAGG
GCGCGTACGCGCTGCGTATTCCCGCCCCGGTGACCCTGAGCCAGTGGTTGTTGGGAGCACGTTGATGACGTCTGC
GTTTGGATTCC
>H1_402-H1_403
(SEQ ID NO: 1301)
TGGGGAGTGGCCGCCTAGGGGGCGATATATAAGGCTCACAAAACCCGTGCTATTTCTTACAGAGGGTGAATATCC
CCATGATCCTCGGCGGCATGCAAATAATAGTTGCGTCAGAGTAGAGCGCAGCCTGCCGGTCTCTCCTAGCGCGGG
AAATCCTGTTTTCTTCTTCAGTCCCGGTGACGAGGACGCGCGCGCGCACCGTAGCCGGACAACGGTCTGGTAAGG
TAGGCGGGATTCGGTTGAGAGCGCC
>H1_403-H1_404
(SEQ ID NO: 1302)
CGTGGAATCCCCGCCTAGGGGGCGCTATATAAGGCTCACCAAACCCGTGCTATTTCTTACAGAGGGTGAATATCC
CATGATCCTTGGCGGCATGCAAATAACAGCTTGCGTCAGAGTAGAGCGCAGCCTACCAGTCTTTCCTAGCGCGGG
AAATCCCGTTTTCTTCTGAGGTCGCCGGTGACGCGCGCGTGCGCCGTAGCCAGAGAACGGTCCGGGAAGGTAGGC
CGGCCGGGATTCGGTTGAGAGCGCC
>H1_407-H1_408
(SEQ ID NO: 1303)
TGGGACAAAAAACTCTTGGTCACATTATATAAGAATCCCATATCTAAAGACATTTCAGGGTTAGGGTGACTTCCC
CAACAATACATAGCGACATGCAAATATCATGGTCCTTCCAGGAGGCGTGCCTCCCCGTCCCCTTGGTCCAGGTCT
TGCTGGGGCGCACGCGCGCTGCGTGTTCCCGCTCTGTGACTCTCAGCTCGCGATTCCTGAGAGCGGATTGGTGAA
GTCAATGTTCTGGCTCC
>FIG. 17 Consensus Sequence
(SEQ ID NO: 1868)
TGAGCTTCCCTCCGCCCTATGRGRAARRGTGGTYCYAYNCAGAACTTATAAGRYTCCCAWAYYYAAAGACATTTC
WCGWTTATGGTGAYTTCCCAGAABACAYAGCGACATGCAAATATTGYAGGGCGTSMCWCCCCTGTCCCTNACRGY
CRTCTTCCTGCCAGGGCGCACGCGCGCTGSGTGTTCCCGCSTAGTGACDCTGGGCCCGCGATTCCTTGGAGCGGG
TTGATGACGTCAGCGTTCGAATTCCATGGCG

What is claimed is:

1. A non-naturally occurring nuclease system comprising a vector comprising a compact bidirectional promoter, wherein the compact bidirectional promoter comprises: a) at least one regulatory element that provides for transcription in one direction of at least one nucleotide sequence encoding a guide RNA (gRNA), wherein the gRNA hybridizes with a target sequence of a nucleic acid; and b) at least one regulatory element that provides for transcription in the opposite direction of a nucleotide sequence encoding a nuclease, wherein the gRNA targets and hybridizes with the target sequence and directs the nuclease to the nucleic acid, wherein the bidirectional promoter is not one or more of SEQ ID NO: 70-SEQ ID NO: 106 and SEQ ID NO: 241-SEQ ID NO: 255.

2. The system of claim 1, wherein the compact bidirectional promoter is between 50 and 225 bp.

3. The system of claim 1, wherein the compact bidirectional promoter is between 50 and 200 bp.

4. The system of claim 1, wherein the compact bidirectional promoter is between 50 and 180 bp.

5. The system of any preceding claim, wherein the bidirectional promoter comprises a nucleic acid sequence selected from SEQ ID NOs: 107-255 or the portion of any one of SEQ ID NOs: 25-106, 469-476, 559-564, 609-614, 673-678, 681, 692-697, 706-711, 719-724, 729-734, 748-753, 784-789, 904-909, 920-925, 936-1303, or any sequence in FIGS. 3-19 that corresponds to an H1 promoter (e.g., from about nucleotide 20 to about nucleotide 490 as numbered in FIG. 3), or a nucleic acid sequence having at least about 80%, at least about 85%, at least about 90%, at least about 95%, at least about 98%, at least about 99%, or at least about 99.5% identity thereto.

6. The system of any preceding claim, wherein the compact bidirectional promoter comprises an H1 promoter.

7. The system of claim 6, wherein the H1 promoter is selected from the portion of any one of SEQ ID NOs: 25-106, 469-476, 559-564, 609-614, 673-678, 681, 692-697, 706-711, 719-724, 729-734, 748-753, 784-789, 904-909, 920-925, 936-1303, or any sequence in FIGS. 3-19 that corresponds to the H1 promoter (e.g., from about nucleotide 20 to about nucleotide 490 as numbered in FIG. 3), or a promoter having at least about 80%, at least about 85%, at least about 90%, at least about 95%, at least about 98%, at least about 99%, or at least about 99.5% identity thereto.

8. The system of any one of claims 1-5, wherein the compact bidirectional promoter comprises a Gar1 promoter.

9. The system of claim 8, wherein the Gar1 promoter is selected from SEQ ID NOs: 107-203, or a promoter having at least about 80%, at least about 85%, at least about 90%, at least about 95%, at least about 98%, at least about 99%, or at least about 99.5% identity thereto.

10. The system of claim 8 or 9, wherein the Gar1 promoter is a human Gar1 promoter.

11. The system of any one of claims 1-5, wherein the compact promoter comprises a bidirectional promoter selected from SEQ ID NOs: 204-255, or a promoter having at least about 80%, at least about 85%, at least about 90%, at least about 95%, at least about 98%, at least about 99%, or at least about 99.5% identity thereto.

12. The system of any preceding claim, wherein the compact promoter comprises at least 95%, 98%, 99%, 99.5% or 100% identity to a naturally-occurring mammalian promoter.

13. The system of any preceding claim, wherein the target sequence comprises the nucleotide sequence AN₁₉NGG, GN₁₉NGG, CN₁₉NGG, or TN₁₉NGG.

14. The system of any preceding claim, wherein the nuclease is a nuclease-dead nuclease.

15. The system of any preceding claim, wherein the nuclease is an RNA-directed nuclease.

16. The system of claim 15, wherein the RNA-directed nuclease is a Cas protein.

17. The system of claim 16, wherein the Cas protein is codon optimized for expression in the cell and/or is a Type-II Cas protein or a Type V Cas protein.

18. The system of claim 17, wherein the cell is a eukaryotic cell.

19. The system of claim 18, wherein the eukaryotic cell is a mammalian cell (e.g. a human cell).

20. The system of any preceding claim, wherein the system is packaged into a single vector.

21. The system of claim 20, wherein the single vector is a viral vector or a plasmid.

22. An expression construct comprising the system of any preceding claim.

23. A vector comprising the expression construct of claim 22.

24. The vector of claim 23, wherein the vector comprises an adeno-associated viral (AAV) vector.

25. A method, the method comprising introducing into a cell a non-naturally occurring nuclease system comprising a vector comprising a compact bidirectional promoter, wherein the compact bidirectional promoter comprises: a) at least one regulatory element that provides for transcription in one direction of at least one nucleotide sequence encoding a guide RNA (gRNA), wherein the gRNA hybridizes with a target sequence of a nucleic acid molecule; and b) at least one regulatory element that provides for transcription in the opposite direction of a nucleotide sequence encoding a nuclease, wherein the gRNA targets and hybridizes with the target sequence and directs the nuclease to the nucleic acid molecule, wherein the bidirectional promoter is not one or more of SEQ ID NO: 70-SEQ ID NO: 106 and SEQ ID NO: 241-SEQ ID NO: 255.

26. The method of claim 25, wherein the compact bidirectional promoter is between 50 and 225 bp.

27. The method of claim 25, wherein the compact bidirectional promoter is between 50 and 200 bp.

28. The method of claim 25, wherein the compact bidirectional promoter is between 50 and 180 bp.

29. The method of any one of claims 25-28, wherein the bidirectional promoter comprises a nucleic acid sequence selected from SEQ ID NOs: 107-255 or the portion of any one of SEQ ID NOs: 25-106, 469-476, 559-564, 609-614, 673-678, 681, 692-697, 706-711, 719-724, 729-734, 748-753, 784-789, 904-909, 920-925, 936-1303, or any sequence in FIGS. 3-19 that corresponds to an H1 promoter (e.g., from about nucleotide 20 to about nucleotide 490 as numbered in FIG. 3), or a nucleic acid sequence having at least about 80%, at least about 85%, at least about 90%, at least about 95%, at least about 98%, at least about 99%, or at least about 99.5% identity thereto.

30. The method of any one of claims 25-29, wherein the compact bidirectional promoter comprises an H1 promoter.

31. The method of claim 30, wherein the H1 promoter is selected from the portion of any one of SEQ ID NOs: 25-106, 469-476, 559-564, 609-614, 673-678, 681, 692-697, 706-711, 719-724, 729-734, 748-753, 784-789, 904-909, 920-925, 936-1303, or any sequence in FIGS. 3-19 that corresponds to the H1 promoter (e.g., from about nucleotide 20 to about nucleotide 490 as numbered in FIG. 3), or a promoter having at least about 80%, at least about 85%, at least about 90%, at least about 95%, at least about 98%, at least about 99%, or at least about 99.5% identity thereto.

32. The method of any one of claims 25-29, wherein the compact bidirectional promoter comprises a Gar1 promoter.

33. The method of claim 32, wherein the Gar1 promoter is selected from SEQ ID NOs: 107-203, or a promoter having at least about 80%, at least about 85%, at least about 90%, at least about 95%, at least about 98%, at least about 99%, or at least about 99.5% identity thereto.

34. The method of claim 32 or 33, wherein the Gar1 promoter is a human Gar1 promoter.

35. The method of any one of claims 25-29, wherein the compact promoter comprises a bidirectional promoter selected from SEQ ID NOs: 204-255, or a promoter having at least about 80%, at least about 85%, at least about 90%, at least about 95%, at least about 98%, at least about 99%, or at least about 99.5% identity thereto.

36. The method of one of claims 25-35, wherein the compact promoter comprises at least 95%, 98%, 99%, 99.5% or 100% identity to a naturally-occurring mammalian promoter.

37. The method of any one of claims 25-36, wherein the target sequence comprises the nucleotide sequence AN₁₉NGG, GN₁₉NGG, CN₁₉NGG, or TN₁₉NGG.

38. The method of any one of claims 25-37, wherein the nuclease is a nuclease-dead nuclease.

39. The method of any one of claims 25-38, wherein the nuclease is an RNA-directed nuclease.

40. The method of claim 39, wherein the RNA-directed nuclease is a Cas protein.

41. The method of claim 40, wherein the Cas protein is codon optimized for expression in the cell and/or is a Type-II Cas protein or a Type-V Cas protein.

42. The method of claim 41, wherein the cell is a eukaryotic cell.

43. The method of claim 42, wherein the eukaryotic cell is a mammalian cell (e.g., a human cell).

44. The method of any one of claims 25-43, wherein the system is packaged into a single vector.

45. The method of claim 44, wherein the single vector is a viral vector or a plasmid.

46. A non-naturally occurring nuclease system comprising a vector comprising a compact bidirectional promoter, wherein the compact bidirectional promoter comprises both RNA pol II and RNA pol III activity, wherein a) the promoter provides for transcription of at least one nucleotide sequence encoding a guide RNA (gRNA), wherein the gRNA hybridizes with a target sequence of a nucleic acid; and b) the promoter provides for transcription of a nucleotide sequence encoding a nuclease, wherein the gRNA targets and hybridizes with the target sequence and directs the nuclease to the nucleic acid, wherein the bidirectional promoter is not one or more of SEQ ID NO: 70-SEQ ID NO: 106 and SEQ ID NO: 241-SEQ ID NO: 255.

47. The system of claim 46, wherein the compact bidirectional promoter is between 50 and 225 bp.

48. The system of claim 46, wherein the compact bidirectional promoter is between 50 and 200 bp.

49. The system of claim 46, wherein the compact bidirectional promoter is between 50 and 180 bp.

50. The system of any preceding claim, wherein the bidirectional promoter comprises a nucleic acid sequence selected from SEQ ID NOs: 107-255 or the portion of any one of SEQ ID NOs: 25-106, 469-476, 559-564, 609-614, 673-678, 681, 692-697, 706-711, 719-724, 729-734, 748-753, 784-789, 904-909, 920-925, 936-1303, or any sequence in FIGS. 3-19 that corresponds to an H1 promoter (e.g., from about nucleotide 20 to about nucleotide 490 as numbered in FIG. 3), or a nucleic acid sequence having at least about 80%, at least about 85%, at least about 90%, at least about 95%, at least about 98%, at least about 99%, or at least about 99.5% identity thereto.

51. The system of any preceding claim, wherein the compact bidirectional promoter comprises an H1 promoter.

52. The system of claim 51, wherein the H1 promoter is selected from the portion of any one of SEQ ID NOs: 25-106, 469-476, 559-564, 609-614, 673-678, 681, 692-697, 706-711, 719-724, 729-734, 748-753, 784-789, 904-909, 920-925, 936-1303, or any sequence in FIGS. 3-19 that corresponds to the H1 promoter (e.g., from about nucleotide 20 to about nucleotide 490 as numbered in FIG. 3), or a promoter having at least about 80%, at least about 85%, at least about 90%, at least about 95%, at least about 98%, at least about 99%, or at least about 99.5% identity thereto.

53. The system of any one of claims 46-50, wherein the compact bidirectional promoter comprises a Gar1 promoter.

54. The system of claim 53, wherein the Gar1 promoter is selected from SEQ ID NOs: 107-203, or a promoter having at least about 80%, at least about 85%, at least about 90%, at least about 95%, at least about 98%, at least about 99%, or at least about 99.5% identity thereto.

55. The system of claim 53 or 54, wherein the Gar1 promoter is a human Gar1 promoter.

56. The system of any one of claims 46-50, wherein the compact promoter comprises a bidirectional promoter selected from SEQ ID NOs: 204-255, or a promoter having at least about 80%, at least about 85%, at least about 90%, at least about 95%, at least about 98%, at least about 99%, or at least about 99.5% identity thereto.

57. The system of any one of claims 46-56, wherein the compact promoter comprises at least 95%, 98%, 99%, 99.5% or 100% identity to a naturally-occurring mammalian promoter.

58. The system of any one of claims 46-57, wherein the target sequence comprises the nucleotide sequence AN₁₉NGG, GN₁₉NGG, CN₁₉NGG, or TN₁₉NGG.

59. The system of any one of claims 46-58, wherein the nuclease is a nuclease-dead nuclease.

60. The system of any one of claims 46-59, wherein the nuclease is an RNA-directed nuclease.

61. The system of claim 60, wherein the RNA-directed nuclease is a Cas protein.

62. The system of claim 61, wherein the Cas protein is codon optimized for expression in the cell and/or is a Type-II Cas protein or a Type V Cas protein.

63. The system of claim 62, wherein the cell is a eukaryotic cell.

64. The system of claim 63, wherein the eukaryotic cell is a mammalian cell (e.g. a human cell).

65. The system of any one of claims 46-64, wherein the system is packaged into a single vector.

66. The system of claim 65, wherein the single vector is a viral vector or a plasmid.

67. An expression construct comprising the system of any one of claims 46-66.

68. A vector comprising the expression construct of claim 67.

69. The vector of claim 68, wherein the vector comprises an adeno-associated viral (AAV) vector.

70. A method, the method comprising introducing into a cell a non-naturally occurring nuclease system comprising a vector comprising a compact bidirectional promoter, wherein the compact bidirectional promoter comprises both RNA pol II and RNA pol III activity, wherein a) the promoter provides for transcription of at least one nucleotide sequence encoding a guide RNA (gRNA), wherein the gRNA hybridizes with a target sequence of a nucleic acid; and b) the promoter provides for transcription of a nucleotide sequence encoding a nuclease, wherein the gRNA targets and hybridizes with the target sequence and directs the nuclease to the nucleic acid, wherein the bidirectional promoter is not one or more of SEQ ID NO: 70-SEQ ID NO: 106 and SEQ ID NO: 241-SEQ ID NO: 255.

71. The method of claim 70, wherein the compact bidirectional promoter is between 50 and 225 bp.

72. The method of claim 70, wherein the compact bidirectional promoter is between 50 and 200 bp.

73. The method of claim 70, wherein the compact bidirectional promoter is between 50 and 180 bp.

74. The method of any one of claims 70-73, wherein the bidirectional promoter comprises a nucleic acid sequence selected from SEQ ID NOs: 107-255 or the portion of any one of SEQ ID NOs: 25-106, 469-476, 559-564, 609-614, 673-678, 681, 692-697, 706-711, 719-724, 729-734, 748-753, 784-789, 904-909, 920-925, 936-1303, or any sequence in FIGS. 3-19 that corresponds to an H1 promoter (e.g., from about nucleotide 20 to about nucleotide 490 as numbered in FIG. 3), or a nucleic acid sequence having at least about 80%, at least about 85%, at least about 90%, at least about 95%, at least about 98%, at least about 99%, or at least about 99.5% identity thereto.

75. The method of any one of claims 70-74, wherein the compact bidirectional promoter comprises an H1 promoter.

76. The method of claim 75, wherein the H1 promoter is selected from the portion of any one of SEQ ID NOs: 25-106, 469-476, 559-564, 609-614, 673-678, 681, 692-697, 706-711, 719-724, 729-734, 748-753, 784-789, 904-909, 920-925, 936-1303, or any sequence in FIGS. 3-19 that corresponds to the H1 promoter (e.g., from about nucleotide 20 to about nucleotide 490 as numbered in FIG. 3), or a promoter having at least about 80%, at least about 85%, at least about 90%, at least about 95%, at least about 98%, at least about 99%, or at least about 99.5% identity thereto.

77. The method of any one of claims 70-74, wherein the compact bidirectional promoter comprises a Gar1 promoter.

78. The method of claim 77, wherein the Gar1 promoter is selected from SEQ ID NOs: 107-203, or a promoter having at least about 80%, at least about 85%, at least about 90%, at least about 95%, at least about 98%, at least about 99%, or at least about 99.5% identity thereto.

79. The method of claim 77 or 78, wherein the Gar1 promoter is a human Gar1 promoter.

80. The method of any one of claims 70-74, wherein the compact promoter comprises a bidirectional promoter selected from SEQ ID NOs: 204-255, or a promoter having at least about 80%, at least about 85%, at least about 90%, at least about 95%, at least about 98%, at least about 99%, or at least about 99.5% identity thereto.

81. The method of one of claims 70-80, wherein the compact promoter comprises at least 95%, 98%, 99%, 99.5% or 100% identity to a naturally-occurring mammalian promoter.

82. The method of any one of claims 70-81, wherein the target sequence comprises the nucleotide sequence AN₁₉NGG, GN₁₉NGG, CN₁₉NGG, or TN₁₉NGG.

83. The method of any one of claims 70-82, wherein the nuclease is a nuclease-dead nuclease.

84. The method of any one of claims 70-83, wherein the nuclease is an RNA-directed nuclease.

85. The method of claim 84, wherein the RNA-directed nuclease is a Cas protein.

86. The method of claim 85, wherein the Cas protein is codon optimized for expression in the cell and/or is a Type-II Cas protein or a Type-V Cas protein.

87. The method of claim 86, wherein the cell is a eukaryotic cell.

88. The method of claim 87, wherein the eukaryotic cell is a mammalian cell (e.g., a human cell).

89. The method of any one of claims 70-88, wherein the system is packaged into a single vector.

90. The method of claim 89, wherein the single vector is a viral vector or a plasmid.

The application's sequence listing, which the Patent Office published only in electronic form, follows.

SEQUENCE LISTING (1919 sequences)

SEQ ID NO: 1-24 - skipped (24 entries)

SEQ ID NO: 25 - DNA, 236 bp, Unknown
  Description of Unknown: Aardvark H1 Bidirectional Promoter sequence
ggaacgaaactaacttggccaaactatataagaatgccatagctttcaacatttaatggttagggtgccttctcataatacacagcgacatgcaaatatcatggcccttccaggaggcgtgcctccccgtcccgcgtgtgcgtcttgcttgtgcgcaggcgcgctgctcttccggctgtaagactttgagcccttgatttctgtgagcgggttcgtgaagtcagtgttctggctcc

SEQ ID NO: 26 - DNA, 231 bp, Unknown
  Description of Unknown: Angolan colobus H1 Bidirectional Promoter sequence
ggggaagggtggtcctccatagaacttataagactcccatactcaaagacatttcacgtttatggtgacttcccagaagacatagcgacatgcaaatattgcagggcgtcacaccccctgtcccttacagctctcttcctgccagggcgcacgcgcgctgggtgttcccgcgtagtgacactgggcccgcgattccttggaacgggttgatgacgtcagcgttcgaattac

SEQ ID NO: 27 - DNA, 230 bp, Unknown
  Description of Unknown: Big brown bat H1 Bidirectional Promoter sequence
gggaagcgagcgtcacacggcggatatataaggcccccttacctgaaggccttttacggttagggtgacttcccacaacacttagcgacatgcaaatttagacgggcgtgcctccccgtccctgggcaacttctctcctggacacgcgcgctcgcgctgagtgttcccgccttttgactccagccgagcgaatcctgggagagggcagatgacgtcaacagtcaggctcc

SEQ ID NO: 28 - DNA, 233 bp, Unknown
  Description of Unknown: Black flying-fox H1 Bidirectional Promoter sequence
gagagaaaaagcctgcacgcagaatatataaggatcccatatctgaagacattttacggttacggtgatttcccacaacacatagcgacatgtaaatatagtggggcatgcctctcctgtccctgggcagcttctcgccagaacgcacgcgcggtgcgtgttcccgccttgtgactaagttggcgagtcagggaggagattgatgatgtcatcatcgtcagctcacccgctcc

SEQ ID NO: 29 - DNA, 230 bp, Unknown
  Description of Unknown: Black snub-nosed monkey H1 Bidirectional Promoter sequence
ggggaagggtggtcctacacagagcttataagactcccatactcaaagacatttctcgtttatggtgacttcccagaagccatagcgacatgcaaatattgcagggcgtcacacccctgtcccttacagccatcttcctgccagggcgcacgcgcgctgggtgttcccgcgtagtgacactgggcccgcgattccttggagcgggttgatgacgtcagcgttcgacttcc

SEQ ID NO: 30 - DNA, 230 bp, Unknown
  Description of Unknown: Bonobo H1 Bidirectional Promoter sequence
gggaaagggtggtgccacacagaacttataagactcccatatccaaagacatttcacgtttatggtgatttcccagaacacatagcgacatgcaaatattgcagggcgccactcccctgtccctcacagccatcttcctgccagggcgcacgcgcgctgggtgttcccgcctagtgacactgggcccgcgattccttggagcgggttgatgacgtcagcgttcgaattcc

SEQ ID NO: 31 - DNA, 212 bp, Unknown
  Description of Unknown: Brush-tailed rat H1 Bidirectional Promoter sequence
gaaggaagttagtcacaaacgcaaattataagaggtccaaagctcagtgtactctatggttagggtgacttcccacaatacatagcgatatgcagatttcttccccagtctggcccgctgggccctccctagagcgcatgcgctgcaagtccacggcggagcaccgggcgggcgatcccggagcgggttgatgacgtcagcgtttgaactcc

SEQ ID NO: 32 - DNA, 233 bp, Unknown
  Description of Unknown: Camel H1 Bidirectional Promoter sequence
gagaaagggtgggctcacgccacctttataaggctcccaaacttaaagacatttctcggttatggcgacttcccacaacacatagcgacatgcaaatactgcagacctgtggcgccgacccggtcctgtgcagccatctttaaggctgggacgcacgcgcgctgcgtgttcccgccctgtgactgcgccggcgattactgggagaggattgatgacgtcaacgttcgggttcc

SEQ ID NO: 33 - DNA, 241 bp, Unknown
  Description of Unknown: Cape golden mole H1 Bidirectional Promoter sequence
gggctaacactgtgttggtattagcttataagaaacccaaatataaagtcatttaacgcttagtgtgacttcccatcatacaaagcgacatgcaaatatcatgggccttccgggaggcgtgccttcccgtcctgcgtactggagttctctctggggcgcacgcgcgctatgtgtttcccgccttgtgacttagggcgggcgattcctgagatccgaatggtgacgtcaactttcaggctcg

SEQ ID NO: 34 - DNA, 221 bp, Unknown
  Description of Unknown: Chinchilla H1 Bidirectional Promoter sequence
gaaagccgaaggtttggagcgaaacttataagaagcccaaatctcactatatttttaggtcatggcgacttcccacaagccacagcgatatgtagatataggagcccctcccagttctggtccttccgcgtctcactaaagcgcatgcgctgcaggttcgcggcctgcgactgggcctgcaattcctgggagcgagttgatgacgtcagcgtttgaactcc

SEQ ID NO: 35 - DNA, 179 bp, Unknown
  Description of Unknown: Chinese hamster H1 Bidirectional Promoter sequence
acagcctggtgaatggcgggctttataaggctccggagagaaagcgctttctcagttatggtggtttcccacaaggcacagcgcacactttatttgcatgcgatctagcgcaggctcccgctccagacaagaagcccgcgcttttcggctgcttatgatgacgtcgggcctcaagcgcc

SEQ ID NO: 36 - DNA, 204 bp, Unknown
  Description of Unknown: Chinese tree shrew H1 Bidirectional Promoter sequence
gggggaagctgggtccactgagttcttataaggtttccagtcctagagcgattttaccattacggtgatttcccagcatccgtagctacatgcaaatagcgcggggcgcgtctctcaggtccctcccccgtgccctctcactgtacgtacccgcgtcctagggacgccgcgcccggggttcccggacgtcagcgttccgacgca

SEQ ID NO: 37 - DNA, 227 bp, Artificial Sequence
  Description of Artificial Sequence: Synthetic polynucleotide
ggggaagggtggtcccacacagaacttataaggctcccatacctaaagacatttcacggttatggtgacttcccacaagacatagcgacatgcaaatattgcagggcgtccctcccctgtccctaggcatcttctcgccagggcgcacgcgcgctgcgtgttcccgccttgtgacactgggcccgcgattcctgggagcgggttgatgacgtcagcgttcgagctcc

SEQ ID NO: 38 - DNA, 229 bp, Unknown
  Description of Unknown: David's myotis H1 Bidirectional Promoter sequence
gagaggggctgtgcacacggcggatatataaggcccccttatgaataaccctttataagttatggtgatttcccacaacgcatagcgacatgcaaattcgatgggcgtgcctcctctgtccccaggcaacttctctcctggacgcgcgctcctcgctgcgtgttcccgccttttgactccagccgagcgaatcctgggagagggcaggtgacgtcaacagtcaggctcg

SEQ ID NO: 39 - DNA, 230 bp, Unknown
  Description of Unknown: Drill H1 Bidirectional Promoter sequence
ggggaaaggtggtcccacacagaacttataagattcccatactcaaagacatttctcgtttatggtgacttcccagaagacacagcgacatgcaaatattgtagggcgtcacacccctgtccctcacagtcatcttcctgccagggcgcacgcgcgctggatgttcccgcgtagtgaccctgggcccgcgattccttggagcgggttgatgacgtcagcgttcgaattcc

SEQ ID NO: 40 - DNA, 230 bp, Unknown
  Description of Unknown: Gibbon H1 Bidirectional Promoter sequence
ggggaaaagtagttttttttagaccttataagattcccaaacccaaagacatttctcgtttatggtgacttcccagaagacatagcgacatgcaaatattgcagggcgccactcccctgtccctcacagccatcttcctgccagggcgcacgcgcgctgggtgttcccgcctagtgacactcggcccgcgattccttggagcgggttgatgacgtcagcgttcgaattcc

SEQ ID NO: 41 - DNA, 217 bp, Unknown
  Description of Unknown: Goat H1 Bidirectional Promoter sequence
ggcaaacaacgcgcgcaaacagcatttataatgagctcatacctaaagccactttacgattacggtgacttcccacaagacattgcggcatgcaaatattttagtgcgtcccgcccctggtagttccacgctaggacgcacacgcactacggttcccgcctttagactgcgctggcgattccagcgagcggactgatgacgtcagcgttggggctcc

SEQ ID NO: 42 - DNA, 187 bp, Unknown
  Description of Unknown: Golden hamster H1 Bidirectional Promoter sequence
gtggcccggcggcgggcgaactatataagcctccgcggaggaagcgctttctcggttagggtggtttcccacaagcctcagcgcacagcctctttgcatacgctcccgccgcccccgggctcctccctctccgcacaagaagcccgcgcatttcgactgcggatgatgacgtcgggcctcgagcgcc

SEQ ID NO: 43 - DNA, 230 bp, Unknown
  Description of Unknown: Golden snub-nosed monkey H1 Bidirectional Promoter sequence
ggggaagggtggtcctacacagagcttataagactcccatactcaaagacatttctcgtttatggtgacttcccagaagccatagcgacatgcaaatattgcagggcgtcacacccctgtcccttacagccatcttcctgccagggcgcacgcgcgctgggtgttcccgcgtagtgacactgggcccgcgattccttggagcgggttgatgacgtcagcgttcgaattcc

SEQ ID NO: 44 - DNA, 210 bp, Unknown
  Description of Unknown: Hedgehog H1 Bidirectional Promoter sequence
gcctaaaccggctctttcaacagacttataaggacctcttatcttaggacatttttttcttagggtaacttcccatgatgcacagcgatatgtaaatatggcgccgcgagtctctcctaggcgtctccccaggacgcaggcgcactgcttgttcccgcgttaacattgctgattctgggagactgctgatgacgtcagcgtccagtctac

SEQ ID NO: 45 - DNA, 218 bp, Unknown
  Description of Unknown: Killer whale H1 Bidirectional Promoter sequence
gccgaaaaccaggctcaagccacatttataaggctcccaaacctaaatacatttgtcggttatggtgacttcccgcaacacattgcgacatgcaaatactgcggagcgttcctcccctagcaactcctcgctgggacgcacgcgcgctacgtgctcccgccttttgaccgagccggcgatacttgggagagggttgatgacgtcagcgttctggctcc

SEQ ID NO: 46 - DNA, 180 bp, Unknown
  Description of Unknown: Lesser Egyptian jerboa H1 Bidirectional Promoter sequence
gggcagaccttaaccaagcggaggtttataaagcgcccacattcagtgacacttctcagtcacggtgacttcccacaaaacacagcgcatgcaaatattatggcgggagggggggtgctcgcctgggcgcacgcgcgctgtgggttcccgcgagcgggatgatgacgtcactaagtgagc

SEQ ID NO: 47 - DNA, 236 bp, Unknown
  Description of Unknown: Manatee H1 Bidirectional Promoter sequence
gagccaaacagctgttggtcacattatataagaatcccatatataaagacatttttggcgtagggtgacttcccacaatacatagcgacatgcaaataccatggtcctccaggaggcgtgcctccccgtccccttggtccggttcttgctggggcgcacgcgcgctgcgtgttcccggtctgtgactcagctcgcgattccggagagcggattggtgaagtcaatgttctgggtcc

SEQ ID NO: 48 - DNA, 227 bp, Unknown
  Description of Unknown: Mas night monkey H1 Bidirectional Promoter sequence
ggggaagggtggtcctatacagaacttataagactcccatacccaaagacatttcacggttatggtgacttcccagaagacacagcgacatgcaaatattgtaggtcgtgcctcgcttgtccctcagtagtcttcctttcagagcgcacgcgcgctgggtgtcccgccaactgacactgggctcgcgattccttggagcgggttgatgacgtcagcgttcgaattcc

SEQ ID NO: 49 - DNA, 228 bp, Unknown
  Description of Unknown: Microbat H1 Bidirectional Promoter sequence
ggagaaggaggcgtagacggcggatatataaggcccccttatgtgtagtccttttacggttagggtgacttcccacaacgcatagcgacatgcaaatttgacgggcgtgcctcctctgtccccgggcaacttctctcctggacgcgcgctcgcgctgcgtgttcccgccttttgactccagccgagcgaatcctgggagagggcaggtgacgtcaacagtcaggctcg

SEQ ID NO: 50 - DNA, 236 bp, Unknown
  Description of Unknown: Opossum H1 Bidirectional Promoter sequence
ggtgcggggcctcaaagagagcgatatataacgctcacaaaacccgtgctatttcttacagagggtgatatccccatgatccccggcggtatgcaaatagtagtcgcgtcagagcagagcgcagtcagccgctctctcctagcgcgggaaatctatttcttcttcagtctcggtaacgagcgcatgcgcatactgtaggtgacctacggttttgtcaggaatcggttgggagcacc

SEQ ID NO: 51 - DNA, 226 bp, Unknown
  Description of Unknown: Pacific walrus H1 Bidirectional Promoter sequence
gggaaacggtggccccaaagagcatttataaagctccctcaactaaatgcatttatcagttatggtgacttcccacaatacatcgcaacatgcaaacatcgcggggagtacctcccctgtccctacgtgtcttctcaggacgcacgcacgcgcgctgtgttcccgccctgtgactctaggcgggcaattcctagaagacgcttgctgacgggaacgttccggctcc

SEQ ID NO: 52 - DNA, 230 bp, Unknown
  Description of Unknown: Pig-tailed macaque H1 Bidirectional Promoter sequence
ggggaaagccgatcccagccagaacttataagattcccatactcaaagacatttctcgtttatggtgacttcccagaagacacagcgacatgcaaatattgtagggcgtcacacccctgtccctcacagtcatcttcctgccagggcgcacgcgcgctgggtgttcccgcgtagtgacactgggcccgcgattccttggagcgggttgatgacgtcagcgttcgaattcc

SEQ ID NO: 53 - DNA, 175 bp, Unknown
  Description of Unknown: Prairie vole H1 Bidirectional Promoter sequence
gggaaggcggggcggcggcactaaaaggctccggagcggcccagactttacagttatggtggcttcccacgaggcgcagcgccactcatttgcatggacccgccccagacgggaagcccgcaccgctcatttgtgtggccccgccccagacgggaagcccgcgccactcatttgc

SEQ ID NO: 54 - DNA, 230 bp, Unknown
  Description of Unknown: Rhesus H1 Bidirectional Promoter sequence
ggggaagggtggtcccacacagaacttataagattcccatactcaaagacctttctcgtttatggtgacttcccagaagacacagcgacatgcaaatattgtagggcgtcacacccctgtccctcacagtcatcttcctgccagggcgcacgcgcgctgggtgttcccgcgtagtgacactgggcccgcgattccttggagcgggttgatgacgtcagcgttcgaattcc

SEQ ID NO: 55 - DNA, 176 bp, Unknown
  Description of Unknown: Ryukyu mouse H1 Bidirectional Promoter sequence
tggagggtggagaccggccgccactataaggctcgaaagaggaataaattttacgtttagggtgatttcccacaaagcacagcgcgtaatttgcatgtgctctatcccaggctccagtgccagacaagaagcccgcgcatccgggcaagggatgatgacgtcgtccttcaagagcg

SEQ ID NO: 56 - DNA, 182 bp, Unknown
  Description of Unknown: Shrew H1 Bidirectional Promoter sequence
gcgtaagacgcgccgcatcgcgtacttataaggatcccctggtcaacgatcttttacagttagggtgacttcccacagtacacggcggtattcaaatatgaagggcgtgtctagtccgggtcctggctaggcgcatgtgcagtgctggttcccgccacttccgacgtctacgtttagactcc

SEQ ID NO: 57 - DNA, 183 bp, Unknown
  Description of Unknown: Shrew mouse H1 Bidirectional Promoter sequence
tgaaggctgtagaccggccgccactataaggctcgaaagaggaataagtttttcgcttacggtgacttcccacaaagcacagcgcgtaatttgcatgtactctatcccaggcttcctgttccagactagaagcccgcgcatccgggcaagggacgatgacatcatccccatccctccagcgcg

SEQ ID NO: 58 - DNA, 230 bp, Unknown
  Description of Unknown: Sifaka H1 Bidirectional Promoter sequence
gagggaaaagggttctgcacagaatttataaggctcccaaatctaaaaacatttcaccattatggtgatttcccacaacacatagcgacatgcaaatatctcagagcgtacctcccctgtcctatacgggcgtcaactcgccatggcgcacgcgcgttgtgtgtttcccgcctgtgactctgggcccgcgattcctcccagcgggttgagtacgtcagctccggtgcttc

SEQ ID NO: 59 - DNA, 230 bp, Unknown
  Description of Unknown: Sooty mangabey H1 Bidirectional Promoter sequence
ggggaaaggtggtcccacaccgaacttataagactcccatactcaaagacatttctcgtttatggtgacttcccagaagacacagcgacatgcaaatattgtagggcgtcacacccctgtccctcacagtcatcttcctgccagggcgcacgcgcgctgggtgttcccgcgtagtgacactgggcccgcgattccttgcagcgggttggtgacgtcagcgttcgaattcc

SEQ ID NO: 60 - DNA, 229 bp, Unknown
  Description of Unknown: Squirrel monkey H1 Bidirectional Promoter sequence
ggggaagggtggtccttcgcagaacttataagattcccagtcccgaggacatttctagattatggtgacttcccagaatacacagcgacatgcaaatattgcaggtcgtgcctcgcctgtccctcactgtcgtcttcctgccagggcgcacgcgcgctgggtgtcccgccaactgacactgggctcgcgattccttggagcgggttgatgacgtcagcgttcgaattcc

SEQ ID NO: 61 - DNA, 240 bp, Unknown
  Description of Unknown: Star-nosed mole H1 Bidirectional Promoter sequence
gcgcagagacaagcttagctagaatttataaggcgcccatacttgcagacatatatcggttagggtgacttcccacaagccatagcgacatgcaaatagagagggcgggcttcccctgagcttaggcgtcttcttacgaagtcgcgagcgcgtcgcgcgcctgttcccgcccggtcactattggcctgtcactattgtcattccgcccttcccgggcggagtctggtgactttcggttcc

SEQ ID NO: 62 - DNA, 167 bp, Artificial Sequence
  Description of Artificial Sequence: Synthetic polynucleotide
gcagcgcagccctctcgccgcttataaagtgccgcccgcacggcccttctcgctcacggcgacttcccataaagcacagcgcgtaatttgcatgcgctctaccccaggctcctgtgctagacaagaagcccgcgcatccgggcaagggatgatgacgtcagatctcc

SEQ ID NO: 63 - DNA, 152 bp, Artificial Sequence
  Description of Artificial Sequence: Synthetic polynucleotide
ggggaaaagtagtgccgcttataaagtgccgcccgcacggcccttctcgctcacggcgacttcccataaagcacagcgcgtaatttgcatgcgctctaccccaggctcctgtgctagacaagaagcccgcgcatcccggacgtcagatctcc

SEQ ID NO: 64 - DNA, 234 bp, Unknown
  Description of Unknown: Tenrec H1 Bidirectional Promoter sequence
aggttaaagccgcgtcgccgcgcgcttataagaatccgggaactaactacatttcaaggtcagggtgattacccaccctgcatagcgacatgcaaatagcacggaacgtccaggagacgtgcctctaggtcttggggagggaggagttcggcccagcgcgcacgcgcactacgtgttcccgcccgctgtctcggggcgggagatcccgggtaggtgacgtcagtcctcggcttc

SEQ ID NO: 65 - DNA, 217 bp, Unknown
  Description of Unknown: Tibetan antelope H1 Bidirectional Promoter sequence
ggcaaacgactcccgcaaacagcatttataatgcgctcatacataaagccacttttcggttacggtgacttcccacaagacattgcgacatgcaaatattttagtgcatcccgcccctggtagctccacgctaggacgcacacgcactacggttcccgcctttagactgccggggcgattccagggagcggactgatgacgtcagcgttcggactcc

SEQ ID NO: 66 - DNA, 204 bp, Unknown
  Description of Unknown: Tree Shrew H1 Bidirectional Promoter sequence
gggggaagctgggtccactgagttcttataaggtttccagtcctagagcgattttaccattgcggtgatttcccagcatccgtagctacatgcaaatagcgcggggcgcgtctctcaggtccctcccccgtgccctctcactgtacgtacccgcgtcctagggacgccgcgcccggggttcccggacgtcagcgttccgacgca

SEQ ID NO: 67 - DNA, 226 bp, Unknown
  Description of Unknown: Weddell seal H1 Bidirectional Promoter sequence
ggggaagagtggccccagagagcatttataaggctcccgcacctaaatgcatttatcagttatggtgacttcccacaatacatagcaacatgcaaatatagcggggagtacctcccctgtccctacgtgtcttctcaggacgcacgcacgcgggctgtgttcccgccctgtgactctaagcgggcaattcctggaagaggcttgctgacggggacgttcaggctcc

SEQ ID NO: 68 - DNA, 227 bp, Unknown
  Description of Unknown: White rhinoceros H1 Bidirectional Promoter sequence
ggagcaaacatgcgccaggcagcctttataagactcacatatctaaagacatttcacagttagggtgacttcccacaggacacagcgatatgcaaatatcgtggagcgtacctccccagtctccgggcatcttctcgcctacacgcacgcgcgccgcgtgttcccgccctgtgacgctaggtgggcctttcatgggagagggttgatgacgtcaacattcggactcc

SEQ ID NO: 69 - DNA, 229 bp, Unknown
  Description of Unknown: White-faced sapajou H1 Bidirectional Promoter sequence
ggggaaggggtggcctacgcagaacttataagattcccacacctaaagacatttaacgattatggtgacttcccagaatacacagcgacatgcaaatattgcaggtcgtacctcgcctgtcccccacagtcgtcttcctgccagggcgcacgcgcgctgggtgtcccgccaactgacagtggactcgcgattccttggagcgggttgatgacgtcaaagttcgaatgcc

SEQ ID NO: 70 - DNA, 233 bp, Unknown
  Description of Unknown: Alpaca H1 Bidirectional Promoter sequence
gggaaagggtgggctcacgcagcctttataagactcccaaacttaaagacatttctcggttatggcgacttcccacaagacatagcgacatgcaaatactgcagacctgtggcgccgacccggtcctgtgcagccatctttacggctgggacgcacgcgcgctgcgtgttcccgccctgtgactgcgccggcgattactgggagaggattgatgacgtcaacgttcgggttcc

SEQ ID NO: 71 - DNA, 211 bp, Unknown
  Description of Unknown: Armadillo H1 Bidirectional Promoter sequence
aaagcgatagttttttaaactggacttataaggcacccatatctacgtatatttcatggttagggtgatttcccacaacacatagcgaaatgcaaatatgtggagcgggcgctgaggcgtggtcgggcgcaagcgcgctgcgacttcccgcctttcggccctaggccccagattcctgggagctggatgatgacgttgacgttcggatacc

SEQ ID NO: 72 - DNA, 231 bp, Unknown
  Description of Unknown: Baboon H1 Bidirectional Promoter sequence
ggggaaaggtggtaccatacagaacttataagattcccatactcaaagacatttcacgattatggtgacttcccagaagacacagcgacatgcaaatattgtagggcgtcacaccccctgtccctcacagtcatcttcctgccagggcgcacgcgcgctgggtgttcccgcgtagtgacactgggcccgcgattccttggagcgggttgatgacgtcagcgttcgaattcc

SEQ ID NO: 73 - DNA, 218 bp, Unknown
  Description of Unknown: Bottlenose dolphin H1 Bidirectional Promoter sequence
gccgaaaaccaggctcaagccacatttataaggctcccaaatctaagtacatttgtcggttatggtgacttcccgcaccacattgcgacatgcaaatactgcggagcgtccctcccctggcaactcctcgctgggacgcacgcgcgctacgtgctcccgccttttgactgcgccggcgatacttgggagagggttgatgacgtcagcgttctggctcc

SEQ ID NO: 74 - DNA, 236 bp, Unknown
  Description of Unknown: Bushbaby H1 Bidirectional Promoter sequence
gcctaaaagggcgcttgcacagaatttataaggttcccaaacagagacacatttcattattatggtgacttcccacaatgcacagcgccatgcaaatatgctaggacctgcctccccacacccgctaccttaaggtcgtcaactaaccagtgcgcgcgcgcactgcgcgtttcccgccggtgactcaatgcccgcgtttggtgggagctagttggtgacctcagttctggaggctc

SEQ ID NO: 75 - DNA, 225 bp, Unknown
  Description of Unknown: Cat H1 Bidirectional Promoter sequence
gggaaagggtggccccgccgagcatttataagactcccatacctaaagacatttctcagttatggtgatttcccacaacacacagcaacatgcaaatatcgaggggtgtaccgcccctgtccttagacgtcttctctccaggacgcacgcgcgctgtattcccgccttgtgactctaggcgggcgattcctgggagagggttgatgacgtccaagttctggcttc

SEQ ID NO: 76 - DNA, 230 bp, Unknown
  Description of Unknown: Chimp H1 Bidirectional Promoter sequence
gggaaagggtggtgccacacagaacttataagactcccatatgcaaagacatttctcgtttatggtgatttcccagaacacatagcgacatgcaaatattgcagggcgccactcccctgtccctcactgccatcttcctgccagggcgcacgcgcgctgggtgttcccgcctagtgacactgggcccgcgattccttggagcgggttgatgacgtcagcgttcgaattcc

SEQ ID NO: 77 - DNA, 218 bp, Unknown
  Description of Unknown: Cow H1 Bidirectional Promoter sequence
ggcaaacaccgcacgcaaatagcacttataatgtgctcatacctagagccacttttcggttacggtgacttctcaaaaagacagtggaacatgcaaatattacagtgcgtcccgcccctggtaggtctacgctaggacgcacgcgcactacggttcccgcctatagactgcgctggcgattcctgggagcggactgatgacgtcagcgttcgggatcc

SEQ ID NO: 78 - DNA, 230 bp, Unknown
  Description of Unknown: Crab-eating macaque H1 Bidirectional Promoter sequence
ggggaagggtggtcccacacagaacttataagattcccatactcaaagacatttctcgtttatggtgacttcccagaagacacagcgacatgcaaatattgtagggcgtcacacccctgtccctcacagtcatcttcctgccagggcgcacgcgcgctgggtgttcccgcgtagtgacactgggcccgcgattccttggagcgggttgatgacgtcagcgttcgaattcc

SEQ ID NO: 79 - DNA, 223 bp, Unknown
  Description of Unknown: Dog H1 Bidirectional Promoter sequence
gcagcgcagccctctcgccgcttataaagtgccgcccgcacggcccttctcgctcacggcgacttcccataacacacagcagcatgcaaataccgcggggagccccgccccgccccggcccccgcaccgcctcgggacgcatgcgccggctctccgttcccgccttgggccggcggcgggcgggcgggcgagcgggcgggagcggctccggcgagcgggcgcc

SEQ ID NO: 80 - DNA, 236 bp, Unknown
  Description of Unknown: Elephant H1 Bidirectional Promoter sequence
gggataggaacaaattcgtcaggatttataagactctcagagctgtagacatttcacagttagggcgatgtcccacaatacatagcaacatgcaaatacatgagccttctaggaggccagcctccccgtccgcgtggtcatcttctcgctagggcgcacgcccgctgcgtgttcccgctctgtgaccaggcaggcgattcctgagaaccgcttggtgacgtcagtgttctggctcc

SEQ ID NO: 81 - DNA, 210 bp, Unknown
  Description of Unknown: European Hedgehog H1 Bidirectional Promoter sequence
gcctaaaccggctctttcgacagacttataaggacctcttatcttaggacatttttttgttagggtaacttcccacgatgcatagcgatatgtaaatatggcgccgcgagtctctcctaggcgtctccccaggacgcaggcgcactgcttgttcccgcgttaacattgctgattctgggagactgctgatgacgtcagcgtccagtctac

SEQ ID NO: 82 - DNA, 226 bp, Unknown
  Description of Unknown: Ferret H1 Bidirectional Promoter sequence
gggaaagggtggacccaccgagcatttataaggctcccgcatctaaagacattttacagttatggtgacttcccacaacgcgtagcaacatgcaaatatcgtggagagtaccgcccctgtccccacgcgtcttctcagcacgcacgcacgcgcgctgtgttcccgccctgtgactccaggcgggtatttccaggggcgggtttgctgacaggaacgttcaggcttc

SEQ ID NO: 83 - DNA, 230 bp, Unknown
  Description of Unknown: Gorilla H1 Bidirectional Promoter sequence
gggaaagggtggtcccacacagaacttataagactcccatatccaaagacatttcacggttatggtgatttcccagaacacatagcgacatgtaaatattgcagggcgccactccccagtccctcacagccatcttcctgccagggcgcacgcgcgctgggtgttcccgcctagtgacactgggcccgcgattccttggagcgggttgatgacgtcagcgttcgaattcc

SEQ ID NO: 84 - DNA, 230 bp, Unknown
  Description of Unknown: Green monkey H1 Bidirectional Promoter sequence
ggggaagggtggtcccttacagaacttataagattcccaaactcaaagacatttcacgtttatggtgacttcccagaagacatagcgacatgcaaatattgcagggcgtcacacccctctccctcacagtcatcttcctgccagggcgcacgcgcgctgggtgttctcgcgtagtgacactgggcccgcgattccttggagcgggttgatgacgtcagcgttcgaattcc

SEQ ID NO: 85 - DNA, 220 bp, Unknown
  Description of Unknown: Guinea pig H1 Bidirectional Promoter sequence
gagaaagaaaggctcaaacctagccttataaggctcccaaatgtcggtatattttttggttatggtgacttcccacaatgcatagcgatatgtagatataggagtacctcccacttctggtccgtcagctcttttctaggacgcgcgcgctgcaggtttccagcctgtgattgggccagcaattccgggaatgaattgatgacgtcagcgtttgaattcc

SEQ ID NO: 86 - DNA, 224 bp, Unknown
  Description of Unknown: Horse H1 Bidirectional Promoter sequence
gggggaaaacagcccatggctgcatttataagactcacagatctaaagccatttcacgaatagggtgacttcccacaatacacagcgacatgcaaacatagcggggcgtgcctttcctgtacctgggcatctctcctggacgcacgcgcgccgggtgttcccgcgctgtgactctaggcaagcgcttcctgggagagagttgatgacggcagcattcgggctcc

SEQ ID NO: 87 - DNA, 230 bp, Homo sapiens
gggaaaaagtggtctcatacagaacttataagattcccaaatccaaagacatttcacgtttatggtgatttcccagaacacatagcgacatgcaaatattgcagggcgccactcccctgtccctcacagccatcttcctgccagggcgcacgcgcgctgggtgttcccgcctagtgacactgggcccgcgattccttggagcgggttgatgacgtcagcgttcgaattcc

SEQ ID NO: 88 - DNA, 225 bp, Unknown
  Description of Unknown: Kangaroo Rat Bidirectional Promoter sequence
aggaaagacttcgctgaggcagactttataaggctcccgcgcagaaagaaactttatagttatggtgatttcccacaagccactgcgtcatgcaaataaagcagggtacggcttccatgtaccttaaggtttttttctaggccgcgtacgctctgcgtattcagccacgtgaccctgagccagtggttgttgggagcacgttgtggacctctgcgtttggattcc

SEQ ID NO: 89 - DNA, 233 bp, Unknown
  Description of Unknown: Large flying fox H1 Bidirectional Promoter sequence
gcgagaaaaattcttcacgcagaatatataaggatcccatatctgaagacattttacgattacggcgatttcccacaacacatagcgacatgtaaatgtagtggggcatgcctcccctgtccctgggcagcttctcgccagaacgcacgcgcggtgcgtgttcccgccttgtgactaagttggcgagtcagggaggagattgatgatgtcatcatcgtcagctcacccgctcc

SEQ ID NO: 90 - DNA, 225 bp, Unknown
  Description of Unknown: Little Brown Bat H1 Bidirectional Promoter sequence
gggagaaggaggcgtagaggatatataaggcccccttatgtgtagtccttttacggttagggtgacttcccacaacgcatagcgacatgcaaatttgacgggcgtgcctcctctgtccctgcgggcaacttctctcctggacgcgcgcgcgctgcgtgttcccgccttttgactccagccgagcgaatcctgggagagggcaggtgacgtcaacagtcaggctcg

SEQ ID NO: 91 - DNA, 229 bp, Unknown
  Description of Unknown: Marmoset H1 Bidirectional Promoter sequence
gaggaaaagtagtcccacagacaacttataagattcccataccctaagacatttcacgattatggtgacttcccagaagacacagcgacatgcaaatattgcaggtcgtgtttcgcctgtccctcacagtcgtcttcctgccagggcgcacgcgcgctgggtttcccgccaactgacgctgggctcgcgattccttggagcgggttgatgacgtcagcgtttgaattcc

SEQ ID NO: 92 - DNA, 176 bp, Mus musculus
ttcaggatgtagaccggccgccactataaggctcgaaagaggaataaatttttcgtttagggtgatttcccacaaagcacagcgcgtaatttgcatgcgctctaccccaggctcctgtgctagacaagaagcccgcgcatccgggcaagggatgatgacgtcgtccttcaagagcg

SEQ ID NO: 93 - DNA, 175 bp, Mus musculus
ttcaggatgtagaccggccgccactataaggctcgaaagaggaataaatttttcgtttagggtgatttcccacaaagcacagcgcgtaattgcatgcgctctaccccaggctcctgtgctagacaagaagcccgcgcatccgggcaagggatgatgacgtcgtccttcaagagcg

SEQ ID NO: 94 - DNA, 201 bp, Unknown
  Description of Unknown: Northern Treeshrew H1 Bidirectional Promoter sequence
gggggaagctgggtccactgagttcttataaggtttccagtcctagagcgattttaccattgcggtgatttcccagcatccgtagctacatgcaaatagcgcggggcgcgtctctcaggtccctccccgccctctcactgtacgtacccgcgtcctagggacgccgcgcccggggttcccggacgtcagcgttccgacgca

SEQ ID NO: 95 - DNA, 229 bp, Unknown
  Description of Unknown: Orangutan H1 Bidirectional Promoter sequence
gagaaagggtggtcccgtccagaacttataagattcccatacccaaagacatttcacgtttatggtgacttcccagaatgcatagcgacatgcaaatattgcagggcgtcactcccctgtccctcacagccatcttcctgccagggcgcccgcgcgctggtgttcccgcctagtgacactgggcccacgattccttggagcgggttgatgacgtcagcgctcgtattcc

SEQ ID NO: 96 - DNA, 228 bp, Unknown
  Description of Unknown: Panda H1 Bidirectional Promoter sequence
agggaaagccgcgcctggggcggatttataaggcttccatatctaaaggcatttcacagtcatggtgacttcccacaatacatagcaacatgcaaatatcgcggggagaacctcccctgtcccttgtacgcggcttctaaagacgcacgcacgcgctctgtgttcccgccctgtgactctaggcgggcaattcctgggacagtgttctgacgggaacgttcaggctcc

SEQ ID NO: 97 - DNA, 225 bp, Unknown
  Description of Unknown: Pig H1 Bidirectional Promoter sequence
ggaaaactgcttctgtgagcacttataaaactcccataagtagagagatttcatagttatggtgatttcccataagacattgcgacatgcaaatattgtggcgcgttcgtccccgtccggtgcaggcagcttcgctccaggacgcacgcgcaatacatgttcccgccttgagactgcgccggcagattcctaggaagtggttgatgacgtcgatgttagggatcc

SEQ ID NO: 98 - DNA, 196 bp, Unknown
  Description of Unknown: Pika H1 Bidirectional Promoter sequence
gggggaagctgggctcgatcagcctttataaagctccaaaaactcaagacatttttccgttacggtggcttcccacagtacacagcgacatgcaaataggcggaccgcttcccgctccggcgcaggcgcgcgggcgctgtctcccctggacgcgcgctcgcggttcccgggagctggctgatgacgttcggtctcc

SEQ ID NO: 99 - DNA, 197 bp, Unknown
  Description of Unknown: Rabbit H1 Bidirectional Promoter sequence
ggggagaggtggatccgaacagactttataaagctccgaaagcccaaggcatctttcccttacggtagcttcccacaagacatagcgacatgcaaatttcagacgcgcttctcgccacagcgcaagcgcgctgtgtgctgacgcgggaacgggccagggcgcggttcccgggagcgggttgatgacgttagatctcc

SEQ ID NO: 100 - DNA, 176 bp, Unknown
  Description of Unknown: Rat H1 Bidirectional Promoter sequence
aggagtgtgaagacctgccgccataataagactccaaaagacagtgaatttaacacttacggtgacttcccacaaagcacagcgtgtaatttgcatgcgctctagcccaggctccagctccggaccagaagcccgcgcatcccggcaaagggtgatgacgtcgtccttcaagcgct

SEQ ID NO: 101 - DNA, 225 bp, Unknown
  Description of Unknown: Rock Hyax Bidirectional Promoter sequence
agggtaaatcggcgctgctcagcatttaaaagaatcccaaatgtgtcgccattttacgcttagggtgatatcccacaagacacagcgacatgcaaatatcgtgagtctctgtttccctgtccacgagggcgtcctctcgctggggcgcacgcgcggtgtgtgtgcccccgttgtgtgttcccgcgattccaaagaactggttgataacgttagacttccggctgc

SEQ ID NO: 102 - DNA, 216 bp, Unknown
  Description of Unknown: Sheep H1 Bidirectional Promoter sequence
ggcgaacaatgcgcgcaaacagcatttataatgagctcatacctaaagccactttacggttacggtgacttcccacaagacattgcggcatgcaaatattttagtgcgtcccgcccctggtagttccacgctaggacgcacacgcactacggttcccgcctttagactgcgctggcgattccaggagcggactgatgacgtcagcgttggggctcc

SEQ ID NO: 103 - DNA, 211 bp, Unknown
  Description of Unknown: Squirrel H1 Bidirectional Promoter sequence
gaaagggactccgcacaagcagagtttataaggctcccatctgtacagccatttctcggtcatggtaactacccacaacacacagcgatatgcaaatatagcagagcgtgtcttcccgcgcgcgcctggtcgtctcggcgccggcgccggaactgtgacagagaccctgcgattcctgggagctggctgatgacatcagtgtctaacctcc

SEQ ID NO: 104 - DNA, 228 bp, Unknown
  Description of Unknown: Tarsier H1 Bidirectional Promoter sequence
gcgagagggtgggtccacacagagcttataaggcttcacaagtaaagatatttcacggtgacggtgacttcccacaatacactgcgacatgcaaatatagccgggcgtgcctccccgatcccggaagagcgactcctagccagtgcgcacgcgcgctgcgtgttcgcgtcctaggtcgctgggcccgcggttcctgggagcgggtggtgacgtcagcggcccagcttc

SEQ ID NO: 105 - DNA, 211 bp, Unknown
  Description of Unknown: Two-Toed Sloth H1 Bidirectional Promoter sequence
agaaaaaaatagtttatgctggatttataagattcccaaatctaaagccatttcacagttacggtgattccccactacacacggcgatatgcaaatatagcggaagtgttcctgaggcgtggtaaagcgcgcgcgcgctgagagttcccgccctgtggtgctgggctggagatgcctgagaactggctgatgacggcaacgttcgggctcc

SEQ ID NO: 106 - DNA, 223 bp, Unknown
  Description of Unknown: White cheeked gibbon H1 Bidirectional Promoter sequence
ggggaaaagtagtagaccttataagattcccaaacccaaagacatttctcgtttatggtgacttcccagaagacatagcgacatgcaaatattgcagggcgccactcccctgtccctcacagccatcttcctgccagggcgcacgcgcgctgggtgttcccgcctagtgacactcggcccgcgattccttggagcgggttgatgacgtcagcgttcgaattcc

SEQ ID NO: 107 - DNA, 135 bp, Homo sapiens
cctgccccgcctctgggagagaaggcggatccctaacgccagctatctccaagagcaacattgccgcagcacttccgggacgtcgtgctgcaaaggacgccgctgttatacgtcacttccacggctcagcgtcag

SEQ ID NO: 108 - DNA, 394 bp, Homo sapiens
cctgccccgcctctgggagagaaggcggatccctaacgccagctatctccaagagcaacattgccgcagcacttccgggacgtcgtgctgcaaaggacgccgctgttatacgtcacttccacggctcagcgtcaggcaagttggcctctctgttgtaaattagtggttaaggttatctattattgccacttttccagcgctaaaggctgttttggaaccagtgttgcttgttccgcgggtgattggcttttttttttggcaaaccagttattcaagtttctggtctttaaaaaactctgtggcggtacggtaaccgaggaggttccagcgcggcggaagtaccccgcgggtgggtgtgtgcgcaaggccagggccagaggggcacgtggcgccg

SEQ ID NO: 109 - DNA, 135 bp, Macaca mulatta
cccaccccgcctctggaagagaaggcggatccctaacgccagctatctccaagagcaacattgccgcagcacttccgggacgtcgtgctgcgaaggacgcagctattatacgtcacttccacggcgcggcgttag

SEQ ID NO: 110 - DNA, 135 bp, Artificial Sequence
  Description of Artificial Sequence: Synthetic polynucleotide
cctaccccgcctctggaagagaaggcggatccctaacgccagctatctccaagagcaacattgccgcagcacttccgggacgtcgtgctgcgaaggacgcagctattatacgtcacttccacggcgcggcgttag

SEQ ID NO: 111 - DNA, 135 bp, Papio anubis
cctacccagcctccggaagagaaggcggatccctaacgccagctatctccaagagcaacattgccgcaccacttccgggacgtcgtgctgcgaaggacgcagttattatacgtcacttccacggcgcggcgttag

SEQ ID NO: 112 - DNA, 135 bp, Artificial Sequence
  Description of Artificial Sequence: Synthetic polynucleotide
cctacccagcctccggaagagaaggcggatccctaacgccagctatctccaagagcaacattgccgcaccacttccgggacgtcgtgctgcgaaggacgcagctattatacgtcacttccacggcgcggcgttag

SEQ ID NO: 113 - DNA, 131 bp, Artificial Sequence
  Description of Artificial Sequence: Synthetic polynucleotide
cctgccccgcctctgggagagaaggcggatccctaacgccagctatctccaagagcaacattgccgcagcacttccgggacgtcgtgctgggacgccgctattatacgtcacttccacggctccgcgttag

SEQ ID NO: 114 - DNA, 135 bp, Callithrix jacchus
cccgccccgcccccggtagagagggcggatctctaacgccaactatctccaagagcaacattgccgcagcacttccgggatgtcgtgctgcgaaggacgccgctattgtacgtcacttccgcttctccactctag

SEQ ID NO: 115 - DNA, 135 bp, Pan paniscus
cctgccccgcctctgggagagaaggcggatccctaacgccagctatctccaagagcaacattgccgcagcacttccgggacgtcgtgctgcaaaggacgccgctgttatacgtcacttccacagctcagcgtcag

SEQ ID NO: 116 - DNA, 135 bp, Pan troglodytes
cctgccccgcctctgggagagaaggcggatccctaacgccagctatctccaagagcaacattgccgcagcacttccgggacgtcgtgctgcaaaggacgccgctgttatacgtcacttccacggctccgcgtcag

SEQ ID NO: 117 - DNA, 135 bp, Pongo abelii
cctgccccgcctctgggagagaaggcggatccctaacgccagctatctccaagagcaacgttgccacagcacttccgggacgtcgtgctgcaaaagacgccgctgttatacgtcacttccacggctcagcgttag

SEQ ID NO: 118 - DNA, 135 bp, Nomascus leucogenys
cctgccccgcctctgggagagaaggcggatccctaactccagctatctccaagagcaacattgccgcagcacttccgggacgtagtgctgcaaaggacgccgctgttatacgtcacttccacgtctcagcgttag

SEQ ID NO: 119 - DNA, 131 bp, Chlorocebus sabaeus
cctaccccacctctggaagggaaggcggatccctaacgccagctatctccaagagcaacattgccgcagcacttccgggacgtcgtgctgggacgcagctattatacgtcacttccacggcgccgcgttag

SEQ ID NO: 120 - DNA, 135 bp, Propithecus coquereli
ctggcccagcctcttatggcgggggcggaccccttacgccagctatcgcccagggcaatatggcgacatcacttccggtatgtcaggttgtgaaaggcgccgctattgtacgtcacttccgctgcccagcgcggg

SEQ ID NO: 121 - DNA, 133 bp, Castor canadensis
cacaactcgcctctgagagaggaggcggatccctaacgcctgctatctccaagggcaacactgcggcatacttccggaacgtcagctcgatgggacgcggttattttacgtcacgtccgctactctcactcgg

SEQ ID NO: 122 - DNA, 135 bp, Unknown
  Description of Unknown: calJac3 Gar-1 sequence
cccgccccgcccccggtagagagggcggatctctaacgccaactatctccaagagcaacattgccgcagcacttccgggatgtcgtgctgcgaaggacgccgctattgtacgtcacttccgctgctccactctag

SEQ ID NO: 123 - DNA, 125 bp, Unknown
  Description of Unknown: otoGar3 Gar-1 sequence
ctcggcgtcagtctcaggcagaaagggcggaaaccggaccccagcgcaatgtcacggcagcacttccggttatgctccgttgcaaaagacgctgctattgtacgtcacttccgccacccggctgg

SEQ ID NO: 124 - DNA, 123 bp, Unknown
  Description of Unknown: speTri2 Gar-1 sequence
acgcccgacgggagaggaggcgggtccctaactccgctatctcctagggcaactcgacggcaatacttccggtaacgtcctgacgtaatggatgccgtttcgctttacttccgctttctcttg

SEQ ID NO: 125 - DNA, 95 bp, Unknown
  Description of Unknown: micOch1 Gar-1 sequence
acgccccgctgtctccaagggcaacgagagacctcacttcctgaaacgtctcgtacagagggcgctgctattctatgtcacttccgctccccggg

SEQ ID NO: 126 - DNA, 124 bp, Unknown
  Description of Unknown: criGri1 Gar-1 sequence
aagcctcactataggacggaaggatccagactcccgctgtctccaagggcaacgcgctaccacacttccggaaacgtcgcgtacggagggcactgctattttgcgtcacttccgctaccccggc

SEQ ID NO: 127 - DNA, 124 bp, Unknown
  Description of Unknown: mesAur1 Gar-1 sequence
acgcctcactctagaacggaagactccagacgcccgccgtctccaagggcaacgcgcgaccacacttccggaaacggcgcgtacggagggcgcttctattttgcgtcacttcctctcctccagg

SEQ ID NO: 128 - DNA, 123 bp, Unknown
  Description of Unknown: mm10 Gar-1 sequence
acgcctcactgtagcacggaaggactcaaacaactccgtttccaagggcaacgcgccgccacacttccggaaacgtcgcgtacggagggcgctgcgattttgcgtcacttccgccacctctag

SEQ ID NO: 129 - DNA, 136 bp, Microcebus murinus
gcggcgccagcctctgggagagggggcggacccttacgccagctgtctccaagggcaatatagcggcagcacttccggtagcgacaggttgtgaaagacgccgctgttgtacgtcacttccgctgcccagagcgag

SEQ ID NO: 130 - DNA, 142 bp, Cavia porcellus
cgagttgcttcgggcctactaacatcatgcggcgtttctggaagaggagcccgcttccggacgcccgccgtctccaggggcaacacttccgtgaacgtcatgtgtaagggacgggttacgtcacttcctgtgctccttggct

SEQ ID NO: 131 - DNA, 131 bp, Marmota marmota
cgcccgacttctggcaagaggaggcgggtccctaactccgctatctcctagggcaacacgacggcaatacttccggtaacgtcctgacgtaatggttgccgtttcgctttacttccgctttctcttgctaa

SEQ ID NO: 132 - DNA, 132 bp, Sciurus vulgaris
cgcccagcctccgggaagaggaagcagctcccgaataccggctatctccaagggcaacaccactgcaatgcttccggaaacgtcatggcgtaatggacgccgttacaacttcacttccgcttctctcgctac

SEQ ID NO: 133 - DNA, 131 bp, Mus caroli
cacgcctcaacagctgttagcacggaaggacccaaacaaccccgtctccaagggcaatgcgccgccacacttccggaaacgtcgcgtacggagggcgctgcgattttgcgtcacttccgccacctctagcg

SEQ ID NO: 134 - DNA, 131 bp, Mus musculus
cacgcctcaccagctgttagcacggaaggactcaaacaactccgtttccaagggcaacgcgccgccacacttccggaaacgtcgcgtacggagggcgctgcgattttgcgtcacttccgccacctctagcg

SEQ ID NO: 135 - DNA, 131 bp, Mus spretus
cacgcctcaccagctgttagcacggaaggactcaaacaactccgtctccaagggcaacgcgccgccacacttccggaaacgtcgcgtacggagggcgctgcgattttgcgtcacttccgccacctctagcg

SEQ ID NO: 136 - DNA, 101 bp, Mus pahari
cccaaacaaccccgtctccaagggcaacgcgtcgccacacttccggaaacgtcgcgtacggagggcgctgcgatttcgcgtcacttccgccacctctagcg

SEQ ID NO: 137 - DNA, 140 bp, Oryctolagus cuniculus
caaccgtaaaccccagcagaaagaacaggcggagccctaacaccaaccttctcccggagacacgccccctgctgcacttccggaatgttctggggcaaagggcgccgctattatacgtcacttccgccgcggttctttcg

SEQ ID NO: 138 - DNA, 134 bp, Balaenoptera musculus
cagccgagccgctgggagaggggcggtccctgacgccagccatcgccaagggcaacgccgcggggcggcacttcctgcaacgtcacgctgccaaggacgccgctattgtacgtcacttcctccgctctccgtag

SEQ ID NO: 139 - DNA, 135 bp, Delphinapterus leucas
caagccgatccgctgggagaggggcggtccctgacgccagccatcgccaagggcaacgccgcggggaggcacttcctgcaacgtcacgctgcaaaggacgccgctattgtacgtcacttcctccacttcccggag

SEQ ID NO: 140 - DNA, 135 bp, Monodon monoceros
caagccgatccgctgggagaggggcggtccctgacgccagccatcgccaggggcaacgccgcggggcggcacttcctgcaacgtcacgctgcaaaggacgccgctattgtacgtcacttcctccacttcccggaa

SEQ ID NO: 141 - DNA, 135 bp, Phocoena sinus
caagccgatccgctgggagaggcgcggtccctgacgccagccatcgccaagggcaacgccgcggggcggcacttcctgcaacgtcacgctgcaaaggacgccgctattgtacgtcacttcctccgctctccgtag

SEQ ID NO: 142 - DNA, 135 bp, Physeter catodon
caaaccgagccgctactagaggggcggtccctcacgccagccatcgccaagggcaacgccgcggggcggcacttcctgcaacgtcacggcgcaaaggacgccgctattgtacgtcacttcctccgctctccgtag

SEQ ID NO: 143 - DNA, 135 bp, Bos grunniens
cttgctgggccgcggggagaggggcggaccctgacgccagtcatcgccaagggcaacgccgcagagcggaacttcctgcaacgtcatgcttccaaggacgccgatattgtgtgtcacttcctctgctcgccgtag

SEQ ID NO: 144 - DNA, 135 bp, Capra hircus
cttgcccggccgcggggagaggggcgggccctgacgccagttatctccaagggcaacgccgcagagcggaacttcctgcaacgtcatgcttcaaaggacgctgatattgtatgtcacttcctctgctcgccgtag

SEQ ID NO: 145 - DNA, 135 bp, Ovis aries
cttcccgggccgcggggagaggggcgggccctgacgccagttatctccaagggcaacgccgcagagcggaacttcctgcaacgtcatgcttcaaaggacgctgatattgtatgtcacttcctctgctggcagtag

SEQ ID NO: 146 - DNA, 135 bp, Ovis aries
cttgccgggccgcggggagaggggcgggccctgacgccagttatctccaagggcaacgccgcagagcggaacttcctgcaacgtcatgcttcaaaggacgctgatattgtatgtcacttcctctgctggcagtag

SEQ ID NO: 147 - DNA, 135 bp, Cervus hanglu
ctggccgggcggcgggcagaggggcgggccctgacgccagtcgtcgccaagggcaacgccgcagagcggaacttcctgcaacgtcatgcttcagaggacgccgatattgtatgtcacttcctctgctcgccatag

SEQ ID NO: 148 - DNA, 134 bp, Catagonus wagneri
cccgcctggccactgggagaggggcagtccctgacgccagtcatcgccaaagggcaaccccgcggggttcctgcaagcaacgtcatgccgcaaaggacgccgctattttacgtcacttcctctgctcccgttag

SEQ ID NO: 149 - DNA, 139 bp, Sus scrofa
cccgcctcgccactgggagaggggcggtgcctgatgccaaccatcgccaagggcaacctcgcggggcagaagttccggcgagtaacgtcatgccgcaaaggacgccgctattttacgtcacttcctctgctcccattag

SEQ ID NO: 150 - DNA, 133 bp, Camelus dromedarius
cccgccgggctgctgggagagaggcggtccctgacgccagccatctccaagggcaaccccgcggcggcacttcctgcagcgccctaaggtaaaagacgccgctattgtacgtcacttcctttgctcgcggtag

SEQ ID NO: 151 - DNA, 126 bp, Equus caballus
aacccgggcgccgggagagggcggacccctgacgccgccgtcaccagggcaaccctgcgggcacttcctgcaacgtcgcggcaaaggacgccgctattacacgtcacttcctctgctcgtcggtag

SEQ ID NO: 152 - DNA, 135 bp, Canis lupus
ccgccaggtccccgggagaggggggcggaactctcacgccaaccatctcccggggcaacagcgcggccgcacttccgggaacttctcgactcaacggacgccactattatacgtcatttcctccgctcctcgtag

SEQ ID NO: 153 - DNA, 135 bp, Canis lupus
ccgccaggtccccgggagaggggggcggaactctcacgccaaccatctcccggggcaacagcgcggccgcacttccggcaacttctcgagtcaacggacgccactattatacgtcatttcctccgctcctcgtag

SEQ ID NO: 154 - DNA, 124 bp, Unknown
  Description of Unknown: rn6 Gar-1 sequence
aggcctgacgatagagccgaagaacccaaaccacccctgtctccaagggcaacgcggcaccacacttccggaagcgtcgagtacggaaggcgctgctattttgcatcatttccgccacccctag

SEQ ID NO: 155 - DNA, 127 bp, Unknown
  Description of Unknown: hetGla2 Gar-1 sequence
cacgccccactccgggagaggagccgggtctcagacgcctgcggtctccaggggcaacaccgcacaacgcttccgtaaacgtcatgtgcaagggacgtcgttacgtcacttcagcgcgccttcctgg

SEQ ID NO: 156 - DNA, 114 bp, Unknown
  Description of Unknown: cavPor3 Gar-1 sequence
catgcggcgtttcggaagaggagcccgcttccggacgcccgccgtctccaggggcaacacttccgtgaacgtcatgtgtaagggacgggttacgtcacttcctgtgctccttgg

SEQ ID NO: 157 - DNA, 125 bp, Unknown
  Description of Unknown: chiLan1 Gar-1 sequence
catgcccaattctggaagaggaatcgcgtccctgacgcctgttatctccaggggcaacactacggcaatacttccgtaaacgtcatatgtaagggacgctaaacgtcacttcctgtactccttgg

SEQ ID NO: 158 - DNA, 112 bp, Unknown
  Description of Unknown: octDeg1 Gar-1 sequence
cgtgcctaactccggaattggacccgcgttccggacaccgctgtttcctggggcaacacttccgtaaacgtcataagcaagggacggcgacgtcacttcctgtgttccgcgg

SEQ ID NO: 159 - DNA, 128 bp, Unknown
  Description of Unknown: ochPri3 Gar-1 sequence
aagggcgagccccgggctgacgggcggatccccaatgccctccatctcccggagcaactcggcacttccgcaaagttccgcggccaaggacgccgcttttgtgcgtcacttccgccgctggacgcggg

SEQ ID NO: 160 - DNA, 139 bp, Unknown
  Description of Unknown: susScr3 Gar-1 sequence
cccgcctcgccactgggagaggggcggtgcctgatgccaaccatcgccaagggcaacctcgcggggcagaagttccggcgagtaacggcatgccgcaaaggacgccgctattttacgtcacttcctctgctcccattag

SEQ ID NO: 161 - DNA, 133 bp, Unknown
  Description of Unknown: vicPac2 Gar-1 sequence
cccgccgggctgctgggagagaggcggtccctgacgccagccatctccaacggcaaccccgcggcggtacttcctgcagcgccctaaggtaaaggacgccgctgttgtacgtcacttcctctgctcgcggtag

SEQ ID NO: 162 - DNA, 133 bp, Unknown
  Description of Unknown: camFer1 Gar-1 sequence
cccgccgggctgctgggagagaggcggtccctgacgccagccatctccaagggcaaccccgcggcggcacttcctgcagcgccctaaggtaaaggacgccgctattgtacgtcacttcctctactcgcggtag

SEQ ID NO: 163 - DNA, 135 bp, Unknown
  Description of Unknown: turTru2 Gar-1 sequence
caagccgatccgctgggagaggggcggtccctgacgccagccattgccaagggcaacgccgcggggcggcacttcctgcaacgtcacgctgcaaaggacgccgctattgtacgtcacttcctccgctcgccgtag

SEQ ID NO: 164 - DNA, 135 bp, Unknown
  Description of Unknown: orcOrc1 Gar-1 sequence
caagccgatccgctgggagaggggcggtccctgacgccagccatcgccaagggcaacgccgcggggcggcacttcctgcaacgtcacgctgcaaaggacgccgctattgtacgtcacttcctccgctcgccgtag

SEQ ID NO: 165 - DNA, 134 bp, Unknown
  Description of Unknown: panHod1 Gar-1 sequence
cttgccgggccgcggggagagggcgggccctgacgctagttatctccaagggcaacgccgcagagcggaacttcctgcaacgtcatgcttcaaaggacgctgatattgtacgtcacttcctctgctcgcagtag

SEQ ID NO: 166 - DNA, 136 bp, Unknown
  Description of Unknown: dasNov3 Gar-1 sequence
gccgccagggactgggaggaacagcctaattcccaacacctcccgtttcctagggcaacaaagcggcgtcacttcctgtaacgccctgacgcaaaggacgttgccatcctacgccacttccgctactctccggtag

SEQ ID NO: 167 - DNA, 114 bp, Unknown
  Description of Unknown: jacJac1 Gar-1 sequence
caggggggaagggaaccccggcgccagcatctcccagggcaacgcggcaagcacttccggggggagtctggagacggagacgccgttattttacgtcacttccgctgtcgctct

SEQ ID NO: 168 - DNA, 121 bp, Unknown
  Description of Unknown: eleEdw1 Gar-1 sequence
tttagaaaaaaaattggaccactaacgccaggcatctccaagggcaacaaagccgtcccacttcctaacgtcatcaggaaaggcacgctgtgcttacgtcatttcctttgcttgacggcag

SEQ ID NO: 169 - DNA, 112 bp, Unknown
  Description of Unknown: tupChi1 Gar-1 sequence
gggaggggcggcgcccggggccagctgtctcccggggcaacctcgcggggcgcttccggcgacgccatgcagccacggacgccgtgacgtcacttccgccacgcagcgccgg

SEQ ID NO: 170 - DNA, 135 bp, Artificial Sequence
  Description of Artificial Sequence: Synthetic polynucleotide
cctgccccgcctctgggagagaaggcggatccctaacgccagctatctccaagagcaacattgccgcagcacttccgggacgtcgtgctgcaaaggacgccgctgttatacgtcacttccacggctcagcgttag

SEQ ID NO: 171 - DNA, 131 bp, Artificial Sequence
  Description of Artificial Sequence: Synthetic polynucleotide
cctaccccgcctctggaagagaaggcggatccctaacgccagctatctccaagagcaacattgccgcagcacttccgggacgtcgtgctgggacgcagctattatacgtcacttccacggcgccgcgttag

SEQ ID NO: 172 - DNA, 138 bp, Ursus thibetanus
ccgccaggtccccaggaggggaggagggggtgttcactaacgccagccatctcccagggcaacaccgcggcggcacttcctgcaacttcttgattgaaaggacgccaccattatacgtcatttcctacggaggcgtag

SEQ ID NO: 173 - DNA, 133 bp, Zalophus californianus
ccgccaggcctccgggaaagggggcggatcactaatgccagccatctcccagggcaacaccgcgggggcacttcctgcaacttcttgattcaaaggacgccactattatacgtcatttcctatggaggactag

SEQ ID NO: 174 - DNA, 135 bp, Mandrillus leucophaeus
cccaccccgcctctggaagagaaggcggatccctaacgccagctatctccaagagcaacattgccgccgcacttccgggacgtcgtgctgcggaggacgcagctattatgcgtcacttccacggcgcggcgttag

SEQ ID NO: 175 - DNA, 114 bp, Dipodomys ordii
cccgctccgcctccggcaacagccatctccaccggcgccaacgccgcggcacttccgggacgcctcggcgcgaaggacgcggacctttgacgtcacttccgccgccctcaggag

SEQ ID NO: 176 - DNA, 124 bp, Chinchilla lanigera
catgcccaattcttggaagaggaatcgcgtccctgacgcctgttatctccaggggcaacactacggcaatacttccgaaacgtcatatgtaagggacgctaaacgtcacttccactccttggcg

SEQ ID NO: 177 - DNA, 115 bp, Octodon degus
cgtgcctaactccgggaattggacccgcgttccggacaccgctgtttcctggggcaacacttccgtaaacgtcataagcaagggacggcgacgtcacttcctgtgttccgcggcg

SEQ ID NO: 178 - DNA, 123 bp, Fukomys damarensis
  modified_base (1)..(11): a, c, t, g, unknown or other
nnnnnnnnnnncccgggagaggagccgggtcccagacctctgcggtctccaggggcaacgccacgcaacacttccgaaacgtcatgtgcgagggacgctgtgctcacttccggtgggccactg

SEQ ID NO: 179 - DNA, 124 bp, Heterocephalus glaber
cacgccccactccagggagaggagccgggtctcagacgcctgcggtctccaggggcaacaccgcacaacgcttccgaaacgtcatgtgcaagggacgtcgttacgtcacttccgcgccttcctg

SEQ ID NO: 180 - DNA, 131 bp, Ictidomys tridecemlineatus
cacgcccgacttctgggagaggaggcgggtccctaactccgctatctcctagggcaactcgacggcaatacttccggaacgtcctgacgtaatggatgccgtttcgctttacttccgctttctcttgctaa

SEQ ID NO: 181 - DNA, 128 bp, Spermophilus dauricus
gcccgacttctgggagaggaggcgggtccctaactccgctatctcctagggcaacacgtcggcaatacttccggaacgtcctgacgtaatggatgccgtttcgctttacttccgctttctctggctaa

SEQ ID NO: 182 - DNA, 128 bp, Urocitellus parryii
gcccgacttctgggagaggaggcgggtcgctaactccgctatctcctagggcaacacgacggcaatacttccggaacgtcctgacgtaatggacgccgtttcgctttacttccgctttctcttgctaa

SEQ ID NO: 183 - DNA, 126 bp, Jaculus jaculus
  modified_base (1)..(10): a, c, t, g, unknown or other
nnnnnnnnnncccagcgggggaagggaaccccggcgccagcatctcccagggcaacgcggcaagcacttccggggggagtctggagaagacgccgttattttacgtcacttccgctgtcgctctag

SEQ ID NO: 184 - DNA, 117 bp, Myotis lucifugus
gagagagccggtctccacctccggggatatcccggggcaaagccgcggtgacacttccggaacgtcaggatgccacggacgcggctgttttacgccacttccttggcttgtcggaag

SEQ ID NO: 185 - DNA, 118 bp, Pteropus vampyrus
ggagaagggtggggcctcaccccagacgtttcctagggcaacaccacggcggcacttccggaacgttgagatgcaacggacgccgctattatacgtcacttcctcggctcgtcgatag

SEQ ID NO: 186 - DNA, 128 bp, Choloepus hoffmanni
accgctcggggcctaagaaagattcttaacgccagtcacctccaagagaaacagagcagttgctcttcctgaacgccacgacgcaaagggcgttgccattgtacgtcacttcctcaactctctggcag

SEQ ID NO: 187 - DNA, 135 bp, Dasypus novemcinctus
gccgccagggagctgggaggaaagcctaattcccaacacctcccgtttcctagggcaacaaagcggcgtcacttcctgaacgccctgacgcaaaggacgttgccatcctacgccacttccgctactctccggtag

SEQ ID NO: 188 - DNA, 129 bp, Procavia capensis
ttctccaggctcctggatgaaggggcggatccttaacgccaaccatctccaacggcaacaacgcaggggcacttcctttacgacaggacgcaacggaagctcttggcgtacgtcacttctgcttgtcag

SEQ ID NO: 189 - DNA, 126 bp, Unknown
  Description of Unknown: equCab2 Gar-1 sequence
cccgggcgccggagagggcgggacccctgacgccgccgtcaccaagggcaaccctgcgggcacttcctgcaaacgtcgcgccaaaggacgccgctattacacgtcacttcctctgctcgtcggtag

SEQ ID NO: 190 - DNA, 131 bp, Unknown
  Description of Unknown: cerSim1 Gar-1 sequence
cccccgggccgccgggagggggtagacccccgacgccggccgtcaccagggcaacagcgcgcggcacttcctgcaacgccgcgaggcagaggacgccgccattatacgtcacttcctctgttcgtcgggag

SEQ ID NO: 191 - DNA, 135 bp, Unknown
  Description of Unknown: felCat8 Gar-1 sequence
ccgccggacccccgggagagggagcggatcaccaacgccaaccgtctcccagggcaacaccgaggcggcacttccggcaaggtctggattcaaaggacgccaccattatacgtcatttcctctgctcctcagtag

SEQ ID NO: 192 - DNA, 135 bp, Unknown
  Description of Unknown: musFur1 Gar-1 sequence
cccgcaggctcccgggagagggggcggatcactaacgccagccatctcccagggcaacagcctgatggcacttcctgcagcttctttgcagtcaaaggacgccactattaaacgtcacttcctacgtaggtgaag

SEQ ID NO: 193 - DNA, 138 bp, Unknown
  Description of Unknown: ailMel1 Gar-1 sequence
ccgccaggtccccaggaggggaggagggggagttcactaacgccagccatctcccagggcaacactgcggcggcacttcctgcaacttcttgattgaaaggacgccaccattatacgtcatttcctacggaggcgtag

SEQ ID NO: 194 - DNA, 133 bp, Unknown
  Description of Unknown: odoRosDiv1 Gar-1 sequence
ccgccaggcttccgggaaagggggcggatcactaacgccagccatctcccagggcaacaccgcgggggcacttccggcaacttcttgattcaaaggacgccactattatacgtcatttcctatggaggactag

SEQ ID NO: 195 - DNA, 134 bp, Unknown
  Description of Unknown: lepWed1 Gar-1 sequence
ccgccaggcctccgggaaagggggcggatcactaacgccagccatctcccagggcaacaccgcggcggcacttcctgcaacttcttagattcaaaggacgccactattatacgtcatttcctacggaggactag

SEQ ID NO: 196 - DNA, 134 bp, Unknown
  Description of Unknown: pteAle1 Gar-1 sequence
cctgcagggctgctaggagaagggcggggcctcaccccagacgtttcctagggcaacaccacggcggcacttccggcaacgttgagatgcaacggacgccgctattatacgtcacttcctcggctcgtcgatag

SEQ ID NO: 197 - DNA, 134 bp, Unknown
  Description of Unknown: pteVam1 Gar-1 sequence
cctgaaggtctgctaggagaagggtggggcctcaccccagacgtttcctagggcaacaccacggcggcacttccggcaacgttgagatgcaacggacgccgctattatacgtcacttcctcggctcgtcgatag

SEQ ID NO: 198 - DNA, 140 bp, Unknown
  Description of Unknown: eptFus1 Gar-1 sequence
cccacgagcggctggaagagggccggtctccacctcctccctcccgggacatcccggggcaacaccgcggtgacacttcctggaacgtcaggatgccacggacgcgactatttgacgccacttccttggcttgtcggaag

SEQ ID NO: 199 - DNA, 133 bp, Unknown
  Description of Unknown: myoLuc2 Gar-1 sequence
ccgaccggcggccaggagagagccggtctccacctccggggatatcccggggcaaagccgcggtgacacttcctggaacgtcaggatgccacggacgcggctgttttacgccacttccttggcttgtcggaag

SEQ ID NO: 200 - DNA, 132 bp, Unknown
  Description of Unknown: loxAfr3 Gar-1 sequence
ccctcctggctcccgggagaggtggcagagccctaacgccatccatctccaagggcaacagcgcagcggcacttcctttaacgtcatgatgcaaaggacgctacctacgtcacttcctctgcccgtcgtcag

SEQ ID NO: 201 - DNA, 131 bp, Unknown
  Description of Unknown: triMan1 Gar-1 sequence
tcctcctggctcctagaagagggggcggatccctaacgccagccatctccaagggcaacaacgcgccggcacttcctgtaatgatgcaaaggacgctgctgccgtacgtcacttccttgactcgtcggtag

SEQ ID NO: 202 - DNA, 129 bp, Unknown
  Description of Unknown: chrAsi1 Gar-1 sequence
acctccgggcctctgggagaggggaggattcctaacgcaggtcgtttccaagggtaacaacgcagcggcacttccttcaacgtgtggacgcaacggacgctgcacgtcacttccgctgcctgtccgttg

SEQ ID NO: 203 - DNA, 134 bp, Unknown
  Description of Unknown: oryAfe1 Gar-1 sequence
tccttcaggctgttgggcgtgggggcggatccctaacgccagccatctccaagggtaacaacgtgtgggcacttccacacgtcatgatgcaaaggccattactattgtacgtcacttcctctgcttgtcggtaa

SEQ ID NO: 204 - DNA, 280 bp, Mus musculus
gagagtaagcaggctcttggtaggtatataaggccatagaattttgtaactttacacatgtggtgaccttatgtagccgactgtacttgatattataacaaatcctgaatccgttttagggttaaataatcctttttatactcgcttcgttctaagtttaaattaaaatacttaaatttaggatgtttttactgttaaccaaaatgctttggggctatgcaaaatacaacagtttggattggttaaaccttccgaagccccgcccccgacggccatgtct

SEQ ID NO: 205 - DNA, 672 bp, Unknown
  Description of Unknown: CD2AP Bidirectional Promoter sequence
agcgagcccaagctcctctgcaccgcttcctcatccgctcgctgcacctggacgcggtcggcgcgcgacccccggccgtgacgtcaccgcacctggcagcagccgtggggaccgggagagagcccgaacgcgacggggcggggtggggcggggagaacgagggcgttctcgcgagatttgcctcctcccggtcccagctccccgcaccttctcggcctctgtctgggtccccaccttagtctacggtgtcgccttttctaactgcgagtgctaaggaagaggcgaggggcgggctccgaggctaggcgggcgctcggggttggagccgagggtctgggcaaaccggtgggtccctccccactgcgggagcggccagggtgggaaaaccgcggtcgggcgggcggggtagggccctcccgccgccgtggctcctggggaggccaggggtgaggagctgtcgccgcctttgcctctgcctcgagggccgcgctgaagagactggtaggagagcgccgcgggcggatggaggcgactcttcgccccgcctgagctcaggaggggctagcgcggagcgcgggtcccgcctccagccgcgggagcggccgcgcgagccaccactggaggaggaggaggaggagcggacgtcggcttctccccgcgggagcccccagc

SEQ ID NO: 206 - DNA, 151 bp, Unknown
  Description of Unknown: DCTN6 Bidirectional Promoter sequence
acgcgacgcaaacaagagtcgcaagcttccgggtccccgccccaccccggctccgcccctcccccaaccctgccaggctctccaatcgcatgtggaattatcgctctacccaggcggtggtgtcgatctacgttccaattggggccgtacc

SEQ ID NO: 207 - DNA, 282 bp, Unknown
  Description of Unknown: EMBP1 Bidirectional Promoter sequence
aaaaccttacacctgcgcaaaaataagcctccctcataagaaagcccaaagatgtccggggtcggggaggaggaaagtgtctctcatctgtcccatcaacgaaaattagtgaaatctgcctcagatgaagtgcaaaggccagtctgcagggatagtttcaacctctccccacgcgatgggctacacatcacctgcccaagctctctcccgacctgctagagcctagagggcggaggccggagaggctgcagccgggagtagcaccgcacatccgggaacgcc

SEQ ID NO: 208 - DNA, 503 bp, Unknown
  Description of Unknown: EP400NL Bidirectional Promoter sequence
acccgtctacagtggacacgacgaaaccagggacatgtcccaccatttcagtggtcacaggcaagagtcttgtggatcttcggatcccacgtaacatctcatctccctaggcaccccgactcccctgcccaatttaaaacagacctcagcctgccccatcccggctgctttgcctggtgctcttctaactgcatgtttatctatcctccccgcctagactgtagggcccgcgaggggagccgctagctgtgcttgtcagtgtgaccagcgctcagcaggtgtccggcgggagggcgggcaaatacaactcagtgcccacgtgcgaatgaatgaacaaactagttccgggcggagccagaggcgcgcgccggcgcggaccgaggcccggccctatccgccccgccccctccgccccgccccctccgccacgtccctccgggtccgctgggcgctgattggtccgagcctcgcctgcgcagtgccgggccggctcccgcgcttgc

SEQ ID NO: 209 - DNA, 347 bp, Unknown
  Description of Unknown: FCHO21 Bidirectional Promoter sequence
ccgactccactgccgctggctggcccttctcttccctctgtccctgggccagtgcccgtcgcaccacaaacagtgcgagcagtctccccggtgactcctcaaggacccagttctccaccattcctaagagaacactcaacccagccgcgcccgggatgcagagagatctaccaacacccgagaatggggacagggcgcatgcgcacaccgtggccgtggcgtctaagtgctcgcccagctgcggcagccgctaggtggcgcatgcgccctggaaggtgcgggccggtctctgggaagaaggcggcggcggcgaaaggcgggggtgctgtgggggccgggccgtgttt

SEQ ID NO: 210 - DNA, 397 bp, Unknown
  Description of Unknown: FCHO22 Bidirectional Promoter sequence
ccgactccactgccgctggctggcccttctcttccctctgtccctgggccagtgcccgtcgcaccacaaacagtgcgagcagtctccccggtgactcctcaaggacccagttctccaccattcctaagagaacactcaacccagccgcgcccgggatgcagagagatctaccaacacccgagaatggggacagggcgcatgcgcacaccgtggccgtggcgtctaagtgctcgcccagctgcggcagccgctaggtggcgcatgcgccctggaaggtgcgggccggtctctgggaagaaggcggcggcggcgaaaggcgggggtgctgtgggggccgggccgtgtttacacagcggcgggcgggcgcggacgcggaacccggcgcggcggcggcacg

SEQ ID NO: 211 - DNA, 569 bp, Unknown
  Description of Unknown: KMT5C1 Bidirectional Promoter sequence
cgcggggcgggaggggagagggatggcggtgcgcgcgcattcaccgcctccctcccgccgggtctggctttctccctcctgtggccgaagctttcctcggagaaatagaagagggaggccgcgactctatggtgatggacggaggccttacccaatggaaagaggagctgtcccaaggccaggcaatcatatacgactactggagctggcagagcccgccctctttccacttggacctgaataacccgacccaaaccgagtttcgcccggagagactgcgctttcggccaatgagtgcgtcgatttcgagccccagtgtgagcgaaggcgggacaagtctccatggcagcgactaaaggacagcgatgtgaaccactgacaacagttcgcggcgtttgacggcggcgggggcgtggcggggttttatctgtgtattgacgagagccgggcgcggagggaaagagtggggcttggccaatgggagcgccgtgagcttcgtagcaacggaggagtggcggtggctgtggccaatagaaagcctcagtggccttggcggggctggcccggag

SEQ ID NO: 212 - DNA, 806 bp, Unknown
  Description of Unknown: KMT5C2 Bidirectional Promoter sequence
cgcggggcgggaggggagagggatggcggtgcgcgcgcattcaccgcctccctcccgccgggtctggctttctccctcctgtggccgaagctttcctcggagaaatagaagagggaggccgcgactctatggtgatggacggaggccttacccaatggaaagaggagctgtcccaaggccaggcaatcatatacgactactggagctggcagagcccgccctctttccacttggacctgaataacccgacccaaaccgagtttcgcccggagagactgcgctttcggccaatgagtgcgtcgatttcgagccccagtgtgagcgaaggcgggacaagtctccatggcagcgactaaaggacagcgatgtgaaccactgacaacagttcgcggcgtttgacggcggcgggggcgtggcggggttttatctgtgtattgacgagagccgggcgcggagggaaagagtggggcttggccaatgggagcgccgtgagcttcgtagcaacggaggagtggcggtggctgtggccaatagaaagcctcagtggccttggcggggctggcccggagagcagatgggaggtgcggcgacagtgtttgacgagagccgaaggaggctgtgggaggtgttggcggcggcggcgcgggcgcctgaggaggaggaggagaagcgggtgaggggcggcgcggggcccgatctctgagccccttcacggccccagccccgcgccgccttggctccccagtcgccccctgccccgactgccccccaccccgcccggcccctcctcgtgtccaggcgcccac

SEQ ID NO: 213 - DNA, 513 bp, Unknown
  Description of Unknown: LZTR11 Bidirectional Promoter sequence
tgaaggagctgaggccctgctaagtaggaatgagaatccagaggctcctcgccgggctgcctctcagtcagtaagaaagccaaggggagaggggagttgctgggggtcagggctgagggcgctagcaggaaagggagcgttgagccgcctgcagaggccgctgcgagcccggaaccctccatgggggatcccggcagcggcagacgatccaggccggagccacgcgcagacccagggcatgccgggaactgcgagccggccgcgggtcttcgggctgcgtgggcctgggaggcgccgggaagagcagtcgcgacggggctagggacgacacactgcattcactggaagggacaacgcagcgccagtacatagcctgaaacgctccccagaaggtcccacgctcgccgcgcggtcgacaaccgcatcctgcgctcgcccgcggtgtctcggcaagcggtaggcttgtcgggaagagctggagggcgcaagtgcggcgctggccggacgtgccgc

SEQ ID NO: 214 - DNA, 616 bp, Unknown
  Description of Unknown: LZTR12 Bidirectional Promoter sequence
tgaaggagctgaggccctgctaagtaggaatgagaatccagaggctcctcgccgggctgcctctcagtcagtaagaaagccaaggggagaggggagttgctgggggtcagggctgagggcgctagcaggaaagggagcgttgagccgcctgcagaggccgctgcgagcccggaaccctccatgggggatcccggcagcggcagacgatccaggccggagccacgcgcagacccagggcatgccgggaactgcgagccggccgcgggtcttcgggctgcgtgggcctgggaggcgccgggaagagcagtcgcgacggggctagggacgacacactgcattcactggaagggacaacgcagcgccagtacatagcctgaaacgctccccagaaggtcccacgctcgccgcgcggtcgacaaccgcatcctgcgctcgcccgcggtgtctcggcaagcggtaggcttgtcgggaagagctggagggcgcaagtgcggcgctggccggacgtgccgcaccgtcagcgcagggctcgccgggaaatgtggtttctccagccggcccggggcggtggccgcaagttgggcttacagcgcggccgatccggcgtggacccggg

SEQ ID NO: 215 - DNA, 41 bp, Unknown
  Description of Unknown: PATJ1 Bidirectional Promoter sequence
gagtcggggcgaggggagggcctgccaggtgaggcgcggtc

SEQ ID NO: 216 - DNA, 131 bp, Unknown
  Description of Unknown: PATJ2 Bidirectional Promoter sequence
gagtcggggcgaggggagggcctgccaggtgaggcgcggtcaccctgggcctctcacttccgcccaggtgaggcagggccgacaccgagcccgcccgacccgggctcccacctgctcctccagcgcaccag

SEQ ID NO: 217 - DNA, 293 bp, Unknown
  Description of Unknown: PCNX11 Bidirectional Promoter sequence
ttcacaaatatcataaatgacaggcaggacgcttttctggagtcaagatctgttagtttcggagtcagaaagaccccgtttagagactcgtaggcgaacttgccagggggcctaccaggggcagaatggggtcctccggaccagccagccgcgtctcagccacctccgcagcccccggggccctgaaccccggccgcgttgacgcgcgcttctcccggacgtcggcaggaggcgcccgcggcggaccaggcgcggcgcgcaccgtagccggcccagggggcggagggagcgga

SEQ ID NO: 218 - DNA, 331 bp, Unknown
  Description of Unknown: PCNX12 Bidirectional Promoter sequence
ttcacaaatatcataaatgacaggcaggacgcttttctggagtcaagatctgttagtttcggagtcagaaagaccccgtttagagactcgtaggcgaacttgccagggggcctaccaggggcagaatggggtcctccggaccagccagccgcgtctcagccacctccgcagcccccggggccctgaaccccggccgcgttgacgcgcgcttctcccggacgtcggcaggaggcgcccgcggcggaccaggcgcggcgcgcaccgtagccggcccagggggcggagggagcggagaggaggagctggagggggcgcggcttcctctcggtcg

SEQ ID NO: 219 - DNA, 739 bp, Unknown
  Description of Unknown: PCNX13 Bidirectional Promoter sequence
ttcacaaatatcataaatgacaggcaggacgcttttctggagtcaagatctgttagtttcggagtcagaaagaccccgtttagagactcgtaggcgaacttgccagggggcctaccaggggcagaatggggtcctccggaccagccagccgcgtctcagccacctccgcagcccccggggccctgaaccccggccgcgttgacgcgcgcttctcccggacgtcggcaggaggcgcccgcggcggaccaggcgcggcgcgcaccgtagccggcccagggggcggagggagcggagaggaggagctggagggggcgcggcttcctctcggtcgctccctggcgccgggcctctttctctgcctggcccagggctggcggccggcgggggtcgcggcggcggcagtgggggcgctggcgggccgcgggtggcgggggccgggccgcggctccgggtgttaggagacaagatggcggcggctctcagaaggccggtctcctcctctccgccgtcctccgccccgccgctcgccgcctcctcctctcgggtctcctcctcctcgtttgctgcctcctcctcctcctgcagcagcaccagcgaccgccgaagcgccggctcgctcacccggagctccggaggtggatagacggggcagctgcaggctccggcgaccgaggccgagctggggccggggcggggacggcggcggcggcggcggcgacggcggcggcgccgggtgggg

SEQ ID NO: 220 - DNA, 391 bp, Unknown
  Description of Unknown: PTGFRN Bidirectional Promoter sequence
aatttttggcataggccaagcggctggttggtggggtgtttagctcaggacgagaggccgaacgagcggggagttggctgaggatagactagacacgcgtgggtgactccagcgtgatggaacgcggggtgtcccgggatagggctaaagcgatgggatttccagacgagtctttcccaggccaacttttaaaggtcggaggaaagtttctcgtggggtgggggcccagaggggatggcagggtgggctccgacgcctcctcgcctttaagcgggtggccccggctcttcctccgttacctggagcggggaggggcttgggaaagtttgtgtttgttgctggcaaagcgccggatgggaggcgcgggcgggcgctgcggttcttcccttct

SEQ ID NO: 221 - DNA, 361 bp, Unknown
  Description of Unknown: RMRP Bidirectional Promoter sequence
acgtcctcagcttcacagagtagtattttatagccctaaagaaattgtgttttatgattagggtgagaaagttggtggcgtgagattaaaaaaaccgttttcgggcataactttctaagactataggctttcagaggcattgtggctagcagaatagctaatagacacgaaatgaacaaatacaggaaagctagaatgacactatcttatgcaaatatggtctggccccgccctacggggagtgggcgtggcctccccggagccggccggcctgctcgcgtgcgcgtgcgcgttggggcggccggccaatgccggaccgcttcggcaccgcccgcccgatccctccacccgtgggccggca

SEQ ID NO: 222 - DNA, 246 bp, Unknown
  Description of Unknown: RNF1871 Bidirectional Promoter sequence
ccaggaccttgcaggtggagagcatagttgccaaaatcaaggcggaggagcgcaccgccgctaggatccaggcggagaagcccaccgcggccaggacctaaggatgcagtacactgctgccaggatcttgtctgtggagcgcagcgcggccaggacctccggctgcagcacaccgctgccaggatcttatcggcagagcgctccgcggtccggaccccgccccgtgcgcgtccccgaccccgcccc

SEQ ID NO: 223 - DNA, 367 bp, Unknown
  Description of Unknown: RNF1872 Bidirectional Promoter sequence
ccaggaccttgcaggtggagagcatagttgccaaaatcaaggcggaggagcgcaccgccgctaggatccaggcggagaagcccaccgcggccaggacctaaggatgcagtacactgctgccaggatcttgtctgtggagcgcagcgcggccaggacctccggctgcagcacaccgctgccaggatcttatcggcagagcgctccgcggtccggaccccgccccgtgcgcgtccccgaccccgccccgtgcgcgtccccggcgttggcgtcttcgtcctgttgctggtctccgtccggtcgccggccgtctaggtctccggccctccccagccgctcctgcgcccttgccggccccgccgcccgcagc

SEQ ID NO: 224 - DNA, 512 bp, Unknown
  Description of Unknown: SAMD4B1 Bidirectional Promoter sequence
cgcccactgaggacagccttgggtgaggcgggccacccaaggggcggggaagaggaggcctggaacgcctgaatcaggaactgtgacttcgctcggggcagctggggtggacgcgcgcgagcctgccccctgcgggcctggaggcccaacctcagactccgccgggcccgttgccctgggcaacgccccgcgcgccccgccccttccccgccccccagccccaaaccccaggcctggccgactgcccgtcacccccacgtccgaccaatcccgccgaggagggggcgggcctcttgggccccgttccaccaccgtcgctcccccctcgccgcgaccccgccttactcggctcacacctcccgcccttcgggctgccctcgccgcccgttggctggcgcgccgttcgtcacccgggcgtgagctaatgccggcgcgcggcggcccccgtcggggcggggccaggggcggtgacgcacggcgcggtgacgcagcgcgacggcggcggcggcggc

SEQ ID NO: 225 - DNA, 562 bp, Unknown
  Description of Unknown: SAMD4B2 Bidirectional Promoter sequence
cgcccactgaggacagccttgggtgaggcgggccacccaaggggcggggaagaggaggcctggaacgcctgaatcaggaactgtgacttcgctcggggcagctggggtggacgcgcgcgagcctgccccctgcgggcctggaggcccaacctcagactccgccgggcccgttgccctgggcaacgccccgcgcgccccgccccttccccgccccccagccccaaaccccaggcctggccgactgcccgtcacccccacgtccgaccaatcccgccgaggagggggcgggcctcttgggccccgttccaccaccgtcgctcccccctcgccgcgaccccgccttactcggctcacacctcccgcccttcgggctgccctcgccgcccgttggctggcgcgccgttcgtcacccgggcgtgagctaatgccggcgcgcggcggcccccgtcggggcggggccaggggcggtgacgcacggcgcggtgacgcagcgcgacggcggcggcggcggcggcggcggtggtcggtgcgggaggagggaggggagcttgcgggcccgaga

SEQ ID NO: 226 - DNA, 630 bp, Unknown
  Description of Unknown: SAMD4B3 Bidirectional Promoter sequence
cgcccactgaggacagccttgggtgaggcgggccacccaaggggcggggaagaggaggcctggaacgcctgaatcaggaactgtgacttcgctcggggcagctggggtggacgcgcgcgagcctgccccctgcgggcctggaggcccaacctcagactccgccgggcccgttgccctgggcaacgccccgcgcgccccgccccttccccgccccccagccccaaaccccaggcctggccgactgcccgtcacccccacgtccgaccaatcccgccgaggagggggcgggcctcttgggccccgttccaccaccgtcgctcccccctcgccgcgaccccgccttactcggctcacacctcccgcccttcgggctgccctcgccgcccgttggctggcgcgccgttcgtcacccgggcgtgagctaatgccggcgcgcggcggcccccgtcggggcggggccaggggcggtgacgcacggcgcggtgacgcagcgcgacggcggcggcggcggcggcggcggtggtcggtgcgggaggagggaggggagcttgcgggcccgagagggggcgacggcggcggcggtggcctgaggaggcccgagcggcggcggtggcggcgaaggccgaggcg

SEQ ID NO: 227 - DNA, 94 bp, Unknown
  Description of Unknown: SETD1A1 Bidirectional Promoter sequence
cggaggcgccccctagtcccaggctctgcacgccctggccccgccccttgactcggccccgcccacagcggaatccgcagattcgccaggtcgg

SEQ ID NO: 228 - DNA, 726 bp, Unknown
  Description of Unknown: SETD1A2 Bidirectional Promoter sequence
cggaggcgccccctagtcccaggctctgcacgccctggccccgccccttgactcggccccgcccacagcggaatccgcagattcgccaggtcggatcctcagaattcctcgggtccctcgatactcggctgaaaattctcatcggactctgagaggagcgctgggctggaggcattttccccagggacagaagcgggctattctctcacttgggccagtaagaaaaatccaaaaaaagttgtcgactctgccagcagggattggctaacgggccgttattttcttgactccaccaaggcggatgaaggggaggctacggctgaggccgggaacagtggcgaatctgcagcctctcagaatttggcagtgcaaggaagggacggggaagagaagcaaagcggcgcgcatcctgtccagcgattcgccccgcccgcccggtgaatctgcgtctgcagaacgcgccactgaaggttccccagcgctggctggcctcctcccctccgccccgccccttttcctcagggactagtcgcagctttcgtcgccgccgattcgtcaaggtcccgggccgcagcatctagatcgtcgtggcgaagccgactctccgggggatgcggccaatctccaagctccctgggccgcaacttccgagcctcccagggcgccggccgaggcgaagccgctaccctcggccccgtgggtcccccggcagcgcctgtggcgaaa

SEQ ID NO: 229 - DNA, 273 bp, Unknown
  Description of Unknown: SNORD651 Bidirectional Promoter sequence
gatatcttttttttttgaagcgagttttaacaagatcagctgtttattcattccactatggggttgaagggatcattggccagctcaaggcttaccttctcttgggctgagatgctgctgccagctctaaaacagcactctgttctcaaaacctgggggaatggagaaggcgcatacaccttagagactgcagatgcagagcaggacaggcatttctgatgacagtcaattaatgactttacaaatttaagtccatcctaacaaaagcccctt

SEQ ID NO: 230 - DNA, 747 bp, Unknown
  Description of Unknown: SNORD652 Bidirectional Promoter sequence
gatatcttttttttttgaagcgagttttaacaagatcagctgtttattcattccactatggggttgaagggatcattggccagctcaaggcttaccttctcttgggctgagatgctgctgccagctctaaaacagcactctgttctcaaaacctgggggaatggagaaggcgcatacaccttagagactgcagatgcagagcaggacaggcatttctgatgacagtcaattaatgactttacaaatttaagtccatcctaacaaaagccccttaagacctaattagaggtaatttttctaagtttttgtaaattattgaggactacaaatcttaattagcttctcagtaggttgtaattttttttttttttttgagatggagtctcgctgttgcccaggctggagtgcagtggcacgatttcgactcactacaacctccgcctcccgggttcaagcgattctcctggctcagcccccaaagtagctgggattacaagtacacgccaccacacccggctaatttttgtatttttggtagagatggggtttcaccatgtcggccagccaggctggtcttgaactcctgacctcaggtgatccacccaccttagcctcccaaagtgctgggattacaggccactgtgcccagcctcaggggagttgtaatctccatttcagtcatatcaatttaaacttcacaaagctaagattacttttccttttcacatctgaggaaaactacatctc

SEQ ID NO: 231 - DNA, 127 bp, Unknown
  Description of Unknown: SPDYA1 Bidirectional Promoter sequence
agggaggggcggggttcgccggcgcgcactcccaggcaggccccgccccctcggccggctgtgcgcgctgattggcccctgccggcctcgcgctccctcgctccgggttggcgggagaccttagagc

SEQ ID NO: 232 - DNA, 241 bp, Unknown
  Description of Unknown: SPDYA2 Bidirectional Promoter sequence
agggaggggcggggttcgccggcgcgcactcccaggcaggccccgccccctcggccggctgtgcgcgctgattggcccctgccggcctcgcgctccctcgctccgggttggcgggagaccttagagcgggtaccgctgctggctagcgaccgacgagcaaccgtctgaggccaggagcgctgcgacggagccttgaccgccgttgcccggccctctcccgcgcagccccgggcttccgcag

SEQ ID NO: 233 - DNA, 233 bp, Unknown
  Description of Unknown: SRP Bidirectional Promoter sequence
ggtcggataccggcgcagaatagcactagaagctgtggtatggtgacgtcatcaactgggccagcccacaacgcctctaagatttcattttactcacccagcgaaacaacctgaccacactgcgcacgcgtttcctttgagcactgcattctgggtaaactgtctcaaaaatttgaagagcgcatgcgtgggccagcttcttccttttacctcgttgcactgctgagagcaag

SEQ ID NO: 234 - DNA, 557 bp, Unknown
  Description of Unknown: TAF151 Bidirectional Promoter sequence
ctcagggtcagattcgtgtacgatttcgttttaatgtacccttttcttccagcatccttgtttgctactcggcgagacagttacaacaaaccgggaagcgatcaggtacgcgagctggtcacgactcacagtcccagagctcgccgactccgaacgcccccaggtggcccaagcactctgcagcaaaagccgccagctaggacgtaccattcgaaattgtagggaaagaaaggctttgcataaccaaatactctgtgtttataaggtccctcctctttcgtttcctaaccgcaaattccatcacacccaataaagtgagaaataggattgtaaataagacggagcaagtaggttccacttcctccccgatcgtgatcgtggcattggtactttctcttctcaattccctctcaataatggtacggctagcggaggggggaatagagggccctgggaaggcctcagggctcggcggctagtaccagtgcagaaacatccctcctgccgcagctttgtggtaccacccgctgcccgctgattggctgccggggtcccgc

SEQ ID NO: 235 - DNA, 616 bp, Unknown
  Description of Unknown: TAF152 Bidirectional Promoter sequence
ctcagggtcagattcgtgtacgatttcgttttaatgtacccttttcttccagcatccttgtttgctactcggcgagacagttacaacaaaccgggaagcgatcaggtacgcgagctggtcacgactcacagtcccagagctcgccgactccgaacgcccccaggtggcccaagcactctgcagcaaaagccgccagctaggacgtaccattcgaaattgtagggaaagaaaggctttgcataaccaaatactctgtgtttataaggtccctcctctttcgtttcctaaccgcaaattccatcacacccaataaagtgagaaataggattgtaaataagacggagcaagtaggttccacttcctccccgatcgtgatcgtggcattggtactttctcttctcaattccctctcaataatggtacggctagcggaggggggaatagagggccctgggaaggcctcagggctcggcggctagtaccagtgcagaaacatccctcctgccgcagctttgtggtaccacccgctgcccgctgattggctgccggggtcccgcagtccgcctcagcccgccgcgccgccctcagtacagctccggccgccgcgccgcctggc

SEQ ID NO: 236 - DNA, 672 bp, Unknown
  Description of Unknown: TAF153 Bidirectional Promoter sequence
ctcagggtcagattcgtgtacgatttcgttttaatgtacccttttcttccagcatccttgtttgctactcggcgagacagttacaacaaaccgggaagcgatcaggtacgcgagctggtcacgactcacagtcccagagctcgccgactccgaacgcccccaggtggcccaagcactctgcagcaaaagccgccagctaggacgtaccattcgaaattgtagggaaagaaaggctttgcataaccaaatactctgtgtttataaggtccctcctctttcgtttcctaaccgcaaattccatcacacccaataaagtgagaaataggattgtaaataagacggagcaagtaggttccacttcctccccgatcgtgatcgtggcattggtactttctcttctcaattccctctcaataatggtacggctagcggaggggggaatagagggccctgggaaggcctcagggctcggcggctagtaccagtgcagaaacatccctcctgccgcagctttgtggtaccacccgctgcccgctgattggctgccggggtcccgcagtccgcctcagcccgccgcgccgccctcagtacagctccggccgccgcgccgcctggctttcgtattcgttgttctcggcgggctgtggggcctccgcgccgcggccgttagtc

SEQ ID NO: 237 - DNA, 166 bp, Unknown
  Description of Unknown: TBL31 Bidirectional Promoter sequence
cgaagcaccctcacagctcacggccctccctccaggccggaaacgtctccgcccgcttccgcttcccgatgcagccgccactgcccgaagcaaagatggcgccaagtgcgcggcgccggcggggacgtcacagtggtcgcgcgcggtgacgccatcgcagcgcgcc

SEQ ID NO: 238 - DNA, 268 bp, Unknown
  Description of Unknown: TBL32 Bidirectional Promoter sequence
cgaagcaccctcacagctcacggccctccctccaggccggaaacgtctccgcccgcttccgcttcccgatgcagccgccactgcccgaagcaaagatggcgccaagtgcgcggcgccggcggggacgtcacagtggtcgcgcgcggtgacgccatcgcagcgcgccgggagtgtggcgttctgtgaagagttcggtgctaacctccctcacgcggcggtggctgccgggaccctagcaggtttcagctggagcggcggcggcggcaac

SEQ ID NO: 239 - DNA, 298 bp, Unknown
  Description of Unknown: ZFY1 Bidirectional Promoter sequence
tttttttaaagccaacaaaggagacagtggggaatgctatatgtctgtatctgctttcctcctcaaccctaggaataaagtaaacacgtttactgagggcgggggtctaagggcctgcaacaatgagatctgtcgccttggctaggactggcgccgagaggcgataggtctcgggagagcctggcgcagggtgtgggagattaggaatcccaggtccaccggagatggcagggggtggcctggcccggtgcggggccgcttgcctgcacgcaaccaactaaggcggtggtgcgcaagt

SEQ ID NO: 240 - DNA, 704 bp, Unknown
  Description of Unknown: ZFY2 Bidirectional Promoter sequence
tttttttaaagccaacaaaggagacagtggggaatgctatatgtctgtatctgctttcctcctcaaccctaggaataaagtaaacacgtttactgagggcgggggtctaagggcctgcaacaatgagatctgtcgccttggctaggactggcgccgagaggcgataggtctcgggagagcctggcgcagggtgtgggagattaggaatcccaggtccaccggagatggcagggggtggcctggcccggtgcggggccgcttgcctgcacgcaaccaactaaggcggtggtgcgcaagtagtggtgacggcgggcgcgcggagaaaaggaacgttgtgacggaaactccagctgccggagaccccaccgcagtgaggtcactggactccccggactcggggcgtgaccggcgccgacccggggcgccgagaggcccaccgggcggagggggcccaactaccatcccgcattttcctgggtctctctcccgggcggtgacgtgacgtgctgacggcgggcccgtgccggggagctgggccgctttttgtcagctccgaactcggcccctcctccctccctccgcccgccctaccagccggagcccggcccagtgctccagagaaaggccgtcctgcagcacccgccgctgtcgccgaccgcccgcacatccgtcgggtgagtcccgcgtgcccccgcggccgcggg

SEQ ID NO: 241 - DNA, 233 bp, Unknown
  Description of Unknown: SRP-RPS29 sequence
cttgctctcagcagtgcaacgaggtaaaaggaagaagctggcccacgcatgcgctcttcaaatttttgagacagtttacccagaatgcagtgctcaaaggaaacgcgtgcgcagtgtggtcaggttgtttcgctgggtgagtaaaatgaaatcttagaggcgttgtgggctggcccagttgatgacgtcaccataccacagcttctagtgctattctgcgccggtatccgacc

SEQ ID NO: 242 - DNA, 239 bp, Unknown
  Description of Unknown: 7sk1 Bidirectional Promoter sequence
gaggtacccaagcggcgcacaagctatataaacctgaaggaagtctcaactttacacttaggtcaagttgcttatcgtactagagcttcagcaggaaatttaactaaaatctaatttaaccagcatagcaaatatcatttattcccaaaatgctaaagtttgagataaacggacttgatttccggctgttttgacactatccagaatgccttgcagatgggtggggcatgctaaatact

SEQ ID NO: 243 - DNA, 389 bp, Unknown
  Description of Unknown: 7Sk2 Bidirectional Promoter sequence
gaggtacccaagcggcgcacaagctatataaacctgaaggaagtctcaactttacacttaggtcaagttgcttatcgtactagagcttcagcaggaaatttaactaaaatctaatttaaccagcatagcaaatatcatttattcccaaaatgctaaagtttgagataaacggacttgatttccggctgttttgacactatccagaatgccttgcagatgggtggggcatgctaaatactgcagtctccattggtgaggtcgtcccggagcctcgcccagctcccgcgcgctagagccgcctgctggtctcacccagccgggaccgctgacctggcgctttgtgcggctccaggcctccgagtggactccagaaagcctgaaaagctatc

SEQ ID NO: 244 - DNA, 371 bp, Unknown
  Description of Unknown: 7sk3 Bidirectional Promoter sequence
gaggtacccaagcggcgcacaagctatataaacctgaaggaagtctcaactttacacttaggtcaagttgcttatcgtactagagcttcagcaggaaatttaactaaaatctaatttaaccagcatagcaaatatcatttattcccaaaatgctaaagtttgagataaacggacttgatttccggctgttttgacactatccagaatgccttgcagatgggtggggcatgctaaatactgcagtctccattggtgaggtcgtcccggagcctcgcccagctcccgcgcgctagagccgcctgctggtctcacccagccgggaccgctgacctggcgctttgtgcggctccaggcctccgagtggactccag

SEQ ID NO: 245 - DNA, 361 bp, Unknown
  Description of Unknown: RMRP-CCDC107 sequence
tgccggcccacgggtggagggatcgggcgggcggtgccgaagcggtccggcattggccggccgccccaacgcgcacgcgcacgcgagcaggccggccggctccggggaggccacgcccactccccgtagggcggggccagaccatatttgcataagatagtgtcattctagctttcctgtatttgttcatttcgtgtctattagctattctgctagccacaatgcctctgaaagcctatagtcttagaaagttatgcccgaaaacggtttttttaatctcacgccaccaactttctcaccctaatcataaaacacaatttctttagggctataaaatactactctgtgaagctgaggacgt

SEQ ID NO: 246 - DNA, 376 bp, Unknown
  Description of Unknown: ALOXE3 Bidirectional Promoter sequence
tcttcacgagagctttactttttgcttataagagggttctctataggaaaagccaggcttgtagaaccgacagaggattttatctgtgcagcatagaatattttggcacagatttggaagcagcgggtgaagctcgcctgctgctgattgagctttttctgcctcccgttcttagagcccccgccgaggctgcgacgcagggactgtaccatagtagaggctggaacagtgcggcgccggaaccggccgcgcggggccgctgcgggctatgggcttctctgagaggttcctccccagtccctagtggcccagatcccggacacctgggctcccgcccaggatcctgcaggcccagggcggtcctggagcggaaaga

SEQ ID NO: 247 - DNA, 308 bp, Unknown
  Description of Unknown: CGB1 Bidirectional Promoter sequence
ttgtcgggcccatcctttcttccctttgatcttacgcagggtgatggagccaatcacaagaggctcatccctgacgtcacccagtccccagggccagtgagggccctgcgttccgtggcgccccctggagggaggaaggggaactgcatctgagagagagcagccaattgggtccgctgactctggccaggttcccgtgccgcgtccaacacccctcactccctgtctcactcccccacggagactcaatttactttccatgtccacattcccagtgcttgcggaagatatcccgctaagagagagac

SEQ ID NO: 248 - DNA, 308 bp, Unknown
  Description of Unknown: CGB2 Bidirectional Promoter sequence
gtgtcggggatctcctttcttccttttgaccttacgcagggtgatggagccaatcaggagaggctcacccctgacgtcacccagtccccagggccagtgagggccctgcgttccgtggcgccccctggagggaggaaggggaactgtatctgagagagagcagccaattgggtccgctgactccggccgggttcccgtgccgcgtccaacacccctcactccctgtctcactcccccacggagactcaatttactttccatgtccacatccccagtgcttgcggaagatatcccgctaagagagagac

SEQ ID NO: 249 - DNA, 412 bp, Unknown
  Description of Unknown: Med16-1 Bidirectional Promoter sequence
gaatattgagttccaccaccagctatttaaagcccctggaacaaatgtctgtacacataggccgacttctcttaaatgacctagagatttaacctctatttatattagcccaatgtgtaatgcaactaacgtagttattgactggagttgagaaagtgctcgttgttctaccaaatatagctacggtggctgctgggaattactggaaatggtcgtatgcaaatagccccggaggcggggcagagcctgagccgcaccgccctcccagaagtctttgggaggcggccccacgcctcaggcgactggttgttaccgaggaagatggcggcgccagacccgaggcgctagggaagatcgcaccgcggacgcccgctgagcttggcgcacgggccaggagctggtgactgccctc

SEQ ID NO: 250 - DNA, 391 bp, Unknown
  Description of Unknown: Med16-2 Bidirectional Promoter sequence
gaatattgagttccaccaccagctatttaaagcccctggaacaaatgtctgtacacataggccgacttctcttaaatgacctagagatttaacctctatttatattagcccaatgtgtaatgcaactaacgtagttattgactggagttgagaaagtgctcgttgttctaccaaatatagctacggtggctgctgggaattactggaaatggtcgtatgcaaatagccccggaggcggggcagagcctgagccgcaccgccctcccagaagtctttgggaggcggccccacgcctcaggcgactggttgttaccgaggaagatggcggcgccagacccgaggcgctagggaagatcgcaccgcggacgcccgctgagcttggcgcacgggc

SEQ ID NO: 251 - DNA, 484 bp, Unknown
  Description of Unknown: DPP9-1 Bidirectional Promoter sequence
cctgataggtagcatcctctccggatatccttaatagtgggggatcatgggtttgactgagtgataccaagtcacaggggggtgtctctccctaacccaccggaagatgtcgttcatggggcgttacgcaccttaggccgccgcgccgcgggctcccccccaagcgccgcggacgccttggtacgtgcctggtggtgtccaatcccaggccgccgcctgggtcgctcaacttccgggtcaaaggtgcctgagccggcgggtcccctgtgtccgccgcggctgtcgtcccccgctcccgccacttccggggtcgcagtcccgggcatggagccgcgaccgtgaggcgccgctggacccgggacgacctgcccagtccggccgccgccccacgtcccggtctgtgtcccacgcctgcagctggaatggaggctctctggaccctttagaaggcacccctgccctcctgaggtcagctgagcggtta

SEQ ID NO: 252 - DNA, 449 bp, Unknown
  Description of Unknown: DPP9-2 Bidirectional Promoter sequence
cctgataggtagcatcctctccggatatccttaatagtgggggatcatgggtttgactgagtgataccaagtcacaggggggtgtctctccctaacccaccggaagatgtcgttcatggggcgttacgcaccttaggccgccgcgccgcgggctcccccccaagcgccgcggacgccttggtacgtgcctggtggtgtccaatcccaggccgccgcctgggtcgctcaacttccgggtcaaaggtgcctgagccggcgggtcccctgtgtccgccgcggctgtcgtcccccgctcccgccacttccggggtcgcagtcccgggcatggagccgcgaccgtgaggcgccgctggacccgggacgacctgcccagtccggccgccgccccacgtcccggtctgtgtcccacgcctgcagctggaatggaggctctctggaccctttagaag

SEQ ID NO: 253 - DNA, 396 bp, Unknown
  Description of Unknown: DPP9-3 Bidirectional Promoter sequence
cctgataggtagcatcctctccggatatccttaatagtgggggatcatgggtttgactgagtgataccaagtcacaggggggtgtctctccctaacccaccggaagatgtcgttcatggggcgttacgcaccttaggccgccgcgccgcgggctcccccccaagcgccgcggacgccttggtacgtgcctggtggtgtccaatcccaggccgccgcctgggtcgctcaacttccgggtcaaaggtgcctgagccggcgggtcccctgtgtccgccgcggctgtcgtcccccgctcccgccacttccggggtcgcagtcccgggcatggagccgcgaccgtgaggcgccgctggacccgggacgacctgcccagtccggccgccgccccacgtcccg

SEQ ID NO: 254 - DNA, 861 bp, Unknown
  Description of Unknown: SNORD13 C8orf41 sequence
tcctgactgcagcaccagaaggctggtctctcccacagaacgaggatggaggcggggagggatccgttgaagagggaaggagcgatcacccaaagagaactaaaatcaaataaaataaaacagagagatgtcttggaggagggggcgagtctgaccgggataagaataaagagaaagggtgaacccgggaggcggagtttgcagtgagccgagatcgcgccactgcactccagcctgggcgacagagtgagactccgtctcagtaaaaaaaaaaaaaaaaaaaagaataaagaggaaaggacgcaagaaagggaaaggggactctcagggagtaaaagagtcttacacttttaacagtgacgttaaaagactactgttgcctttctgaagactaaaaagaaaaaaaacttaaaaatttaaagaaataaacttctgagccatgtcaccaacttaaccacccccaggtacctgcaacggctcgcgcccgccggtgtctaacaggatccggacctagctcatattgctgccgcaaaacgcaaggctagcttccgccagtactgccgcaacaccttcttatttcacgacgtatggtcgtaaagcaataaagatccaggctcgggaaaatgacggagaggtggaactatagagaataaatttgcatatataataatccgctcgctaattgtgtttctgttttcctttgctaaggtagaaacaaaagaataatcacagaatctcagtgggactttgaaaatatccaggattttatacgtgaagaatggatgtatcgcattacggtagtcaccctatgtgtaaattagtggcacatacttggcactccttaatgtcaactataagatg

SEQ ID NO: 255 - DNA, 525 bp, Unknown
  Description of Unknown: THEM259 Bidirectional Promoter sequence
gactcaagggttactgtcacacctattttaagcccttcaatcaaatcatcttttggttaggataacttatggtcggtttcatatttagcataatttcctacagtggtatgttgcagaacaactttcgtgcttacgcttactttgatgtcttcgatcacgtaaaatcccatatcttatcgtaattttaccgccttatactggcctcatagccgcggtggattgtgggtgccaatatgcaaaagaggtggcccagatgcaggcccgccccctggagcggccgaggtagggggtgaggcctccgcgggcgccgctggcatcccagcgttctctgcgggcgcaggggggccgctcttgcccggcgtggcgactcgctagcgtcagcagcgccgcagccggacgagaaagcggaagatggcggcggcggccgggaggccgtgaggagagcggcggctgcgagggcggccgatggcggccgggaggcgccctcggacacttgcgggtcgttagggcgcgacgctgggaggc

SEQ ID NO: 256 - DNA, 9 bp, Artificial Sequence
  Description of Artificial Sequence: Synthetic oligonucleotide
gccgccacc

SEQ ID NO: 257 - DNA, 6 bp, Artificial Sequence
  Description of Artificial Sequence: Synthetic oligonucleotide
gccacc

SEQ ID NO: 258 - DNA, 49 bp, Artificial Sequence
  Description of Artificial Sequence: Synthetic oligonucleotide
aataaaatatctttattttcattacatctgtgtgttggttttttgtgtg

SEQ ID NO: 259 - DNA, 154 bp, Artificial Sequence
  Description of Artificial Sequence: Synthetic polynucleotide
aataaaatatctttattttcattacatctgtgtgttggttttttgtgtgaatcgatagtactaacatacgctctccatcaaaacaaaacgaaacaaaacaaactagcaaaataggctgtccccagtgcaagtgcaggtgccagaacatttctct

SEQ ID NO: 260 - DNA, 240 bp, Artificial Sequence
  Description of Artificial Sequence: Synthetic polynucleotide
atctagataactgatcataatcagccataccacatttgtagaggttttacttgctttaaaaaacctcccacacctccccctgaacctgaaacataaaatgaatgcaattgttgttgttaacttgtttattgcagcttataatggttacaaataaagcaatagcatcacaaatttcacaaataaagcatttttttcactgcattctagttgtggtttgtccaaactcatcaatgtatctta

SEQ ID NO: 261 - DNA, 120 bp, Artificial Sequence
  Description of Artificial Sequence: Synthetic polynucleotide
ttgtttattgcagcttataatggttacaaataaagcaatagcatcacaaatttcacaaataaagcatttttttcactgcattctagttgtggtttgtccaaactcatcaatgtatcttat

SEQ ID NO: 262 - DNA, 228 bp, Artificial Sequence
  Description of Artificial Sequence: Synthetic polynucleotide
cgactgtgccttctagttgccagccatctgttgtttgcccctcccccgtgccttccttgaccctggaaggtgccactcccactgtcctttcctaataaaatgaggaaattgcatcgcattgtctgagtaggtgtcattctattctggggggtggggtggggcaggacagcaagggggaggattgggaagacaatagcaggcatgctggggatgcggtgggctctatgg

SEQ ID NO: 263 - DNA, 271 bp, Artificial Sequence
  Description of Artificial Sequence: Synthetic polynucleotide
gggggaggctaactgaaacacggaaggagacaataccggaaggaacccgcgctatgacggcaataaaaagacagaataaaacgcacgggtgttgggtcgtttgttcataaacgcggggttcggtcccagggctggcactctgtcgataccccaccgagaccccattggggccaatacgcccgcgtttcttccttttccccaccccaccccccaagttcgggtgaaggcccagggctcgcagccaacgtcggggcggcaggccctgccatag

SEQ ID NO: 264 - DNA, 32 bp, Artificial Sequence
  Description of Artificial Sequence: Synthetic oligonucleotide
ggtatcaaataaaatacgaaatgtgacagatt

SEQ ID NO: 265 - DNA, 26 bp, Artificial Sequence
  Description of Artificial Sequence: Synthetic oligonucleotide
aaataaaatacgaaatgtgacagatt

SEQ ID NO: 266 - DNA, 100 bp, Artificial Sequence
  Description of Artificial Sequence: Synthetic polynucleotide
ggttgctgatttctccacagcttgcatttctgaaccaaaggcccttttcagggccgcccaactaaacaaaagaagagctgtatccattaagtcaagaagc

SEQ ID NO: 267 - DNA, 174 bp, Artificial Sequence
  Description of Artificial Sequence: Synthetic polynucleotide
gattcgtcagtagggttgtaaaggtttttcttttcctgagaaaacaaccttttgttttctcaggttttgctttttggcctttccctagctttaaaaaaaaaaaagcaaaagacgctggtggctggcactcctggtttccaggacggggttcaagtccctgcggtgtctttgctt

SEQ ID NO: 268 - DNA, 123 bp, Artificial Sequence
  Description of Artificial Sequence: Synthetic polynucleotide
aaaggtttttcttttcctgagaaatttctcaggttttgctttttaaaaaaaaagcaaaagacgctggtggctggcactcctggtttccaggacggggttcaagtccctgcggtgtctttgctt

SEQ ID NO: 269 - DNA, 242 bp, Ovis aries
tgagcttccctccgccctacggcgaacaatgcgcgcaaacagcatttataatgagctcatacctaaagccactttacggttacggtgacttcccacaagacattgcggcatgcaaatattttagtgcgtcccgcccctggtagttccacgctagtacgcacacgcactacggttcccgcctttagactgcgctggcgattccaggagcggactgatgacgtcagcgttggggctccatggcg

SEQ ID NO: 270 - DNA, 242 bp, Ovis orientalis; identical to SEQ ID NO: 269

SEQ ID NO: 271 - DNA, 242 bp, Ovis aries
tgagcttccctccgccctacggcgaacgatgcgcgcaaacagcatttataatgagctcatacctaaagccactttacggttacggtgacttcccacaagacattgcggcatgcaaatattttagtgcgtcccgcccctggtagttccacgctagtacgcacacgcactacggttcccgcctttagactgcgctggcgattccaggagcggactgatgacgtcagcgttggggctccatggcg

SEQ ID NO: 272 - DNA, 242 bp, Ovis aries
tgagcttccctccgccctacggcgaacgatgcgcgcaaacagcatttataatgagctcatacctaaagccactttacggttacggtgacttcccacaagacattgcggcatgcaaatattttagtgcgtcccgcccctggtagttccacgctaggacgcacacgcactacggttcccgcctttagactgcgctggcgattccaggagcggactgatgacgtcagcgttggggctccatggcg

SEQ ID NO: 273 - DNA, 241 bp, Ovis ammon
tgagcttccctccgccctacgacgaacaatgcgcgcaaacagcatttataatgagctcatacctaaagccactttacggttacggtgacttcccacaagacattgcggcatgcaaatattttagtgcgtcccgcccctggtagttccacgctaggacgcacacgcactacggttcccgcctttagactgcgctggcgattccaggagcggactgatgacgtcagcgttggggctccatggc

SEQ ID NO: 274 - DNA, 241 bp, Ovis ammon; identical to SEQ ID NO: 273

SEQ ID NO: 275 - DNA, 241 bp, Ovis aries
tgagcttccctccgccctacggcgaacaatgcgcgcaaacagcatttataatgagctcatacctaaagccactttacggttacggtgacttcccacaagacattgcggcatgcaaatattttagtgcgtcccgcccctggtagttccacgctaggacgcacacgcactacggttcccgcctttagactgcgctggcgattccaggagcggactgatgacgtcagcgttggggctccatggc

SEQ ID NO: 276 - DNA, 241 bp, Ovis aries
tgagcttccctccgccctacggcgaacaacgcgcgcaaacagcatttataatgagctcatacctaaagccactttacggttacggtgacttcccacaagacattgcggcatgcaaatattttagtgcgtcccgcccctggtagttccacgctaggacgcacacgcactacggttcccgcctttagactgcgctggcgattccaggagcggactgatgacgtcagcgttggggctccatggc

SEQ ID NO: 277 - DNA, 241 bp, Ovis nivicola
tgagcttccctccgccctacggcgaacaacgcgcgcaaacagcatttataatgagctcacacctaaagccactttacggttacggtgacttcccacaagacattgcggcatgcaaatattttagtgcgtcccgcccctggcagttccacgctaggacgcacacgcactacggttcccgcctttagactgcgctggcgattccaggagcggactgatgacgtcagcgttggggctccatggc

SEQ ID NO: 278 - DNA, 241 bp, Hemitragus hylocrius
tgagcttccctccgccctacggcaaacaatgcgcgcaagcagcatttataatgagctcatacctaaagccactttacggttacggtgacttcccacaagacattgcggcatgcaaatattttagtgcgtcccgcccctggtagttccacgctaggacgcacacgcactacggttcccgcctttagactgcgctggcgattccaggagcggactgatgacgtcagcgttggggctccatggc

SEQ ID NO: 279 - DNA, 241 bp, Ovis canadensis
tgagcttccctccgccctacggcgaacaacgcgcgcaaacagcatttataatgagctcatacctaaagccactttacggttacggtgacttcccacaagacattgcggcatgcaaatattttagtgcgtcccgcccctggtagttccacgccaggacgcacacgcactacggttcccgcctttagactgcgctggcgattccaggagcggactgatgacgtcagcgttggggctcgatggc

SEQ ID NO: 280 - DNA, 242 bp, Capra hircus
tgagcttccctccgccctacggcaaacaacgcgcgcaaacagcatttataatgagctcatacctaaagccactttacgattacggtgacttcccacaagacattgcggcatgcaaatattttagtgcgtcccgcccctggtagttccacgctaggacgcacacgcactacggttcccgcctttagactgcgctggcgattccagcgagcggactgatgacgtcagcgttggggctccatggc

SEQ ID NO: 281 - DNA, 242 bp, Capra aegagrus; identical to SEQ ID NO: 280

SEQ ID NO: 282 - DNA, 242 bp, Capra hircus
tgagcttccctccgccctacggcaaacaacgcgcgcaaacagcatttataatgagctcatacctaaagccactttacggttacggtgacttcccacaagacattgcggcatgcaaatattttagtgcgtcccgcccctggtagttccacgctaggacgcacacgcactacggttcccgcctttagactgcgctggcgattccagcgagcggactgatgacgtcagcgttggggctccatggc

SEQ ID NO: 283 - DNA, 242 bp, Capra aegagrus
tgagcttccctccgccctacggcaaacaacgcgcgcaaacagcatttataatgagctcatacctaaagccactttacgattacggtgacttcccacaagacattgcggcatgcaaatattttagtgcgtcccgcccctggtagttccacgctaggacgcacacgcactacggttcccgcctttagactgcgctggcgattccagcgagccgactgatgacgtcagcgttggggctccatggc

SEQ ID NO: 284 - DNA, 242 bp, Pseudois nayaur
tgagcttccctccgccctacggcaaataacgcgcgcaaacagcatttataatgagctcatacctaaagccactttacggttacggtgacttcccacaagacattgcggcatgcaaatattttagtgcgtcccgcccctggtagttccacgctaggacgcacacgcactacggttcccgcctttagattgcgctggcgattccagcgagcggactgatgacgtcagcgttggggctccatggc

SEQ ID NO: 285 - DNA, 242 bp, Capra sibirica
tgagcttccctccgccctacggcaaacaacgcgcgcaaacagcatttataatgagctcatacctaaagccactttacggttacggtgacttcccacaagacattgcggcatgcaaatattttagtgcgtcccgcccctggtagttcgacgctaggacgcacacgcactacggttcccgcctttagactgcgctggcgattccagcgagcggactgatgacgtcagcgttggggctccatggc

SEQ ID NO: 286 - DNA, 242 bp, Capra hircus
tgagcttccctccgccctacggcgaacaacgcgcgcaaacagcatttataatgcgctcatacctaaagccacttttcgattacggtgacttcccacaagacattgcggcatgcaaatattttagtgcgtcccgcccctggtagttccacgctaggacgcacacgcactacggttcccgcctttagactgcgctggcgattccagcgagcggactgatgacgtcagcgttggggctccatggc

SEQ ID NO: 287 - DNA, 242 bp, Capra hircus; identical to SEQ ID NO: 286

SEQ ID NO: 288 - DNA, 242 bp, Capra hircus
tgagcttccctccgccctacggcgaacaacgcgtccaaacagcatttataatgcgctcatacctaaagccacttttcggttacggtgacttcccacaagacattgcggcatgcaaatattttagtgcgtcccgcccctggtagttccacgctaggacgcacacgcactacggttcccgcctttagactgcgctggcgattccagcgagcggactgatgacgtcagcgttggggctccatggc

SEQ ID NO: 289 - DNA, 242 bp, Ammotragus lervia
tgagcttccctccgccctacagcaaataacgagcgcaaacagcatttataatgagctcatacctaaagccactttacggttacggtgacttcccacaagacattgcggcatgcaaatattttagtgcgtcccgcccctggtagttccacgctaggacgcacacgcactacggttcccgcctttagactgcgctggcgattcccgcgagcggactgatgacgtcagcgtgggggctccatggc

SEQ ID NO: 290 - DNA, 242 bp, Kobus ellipsiprymnus
tgagcttccctccgccctacggccaacaccgcgcgcaaacagcgtttataatgcgctcacacctaaagccactttacggttacggtgactccccacaagacactgcgacatgcaaatattttagtgcatcccgcccctggtagtcccacgctgggacgcacacgcacgacggttcccgcctttagactgcgctggcgattccggggagcgggctgatgacgtcagcgttcgggctccatggc

SEQ ID NO: 291 - DNA, 242 bp, Redunca redunca
tgagcttccctccgccctacggcaaacaccgcgcgcaaacagcatttataatgcgctcatacctaaagccactttacggttacggtgacttcccacaagacattgcgacatgcaaatattttagtgcatcccgcccctggtagttccacgctgggacgcacacgcactacggttcccgcctttagactgcgctggcgattccagggagcgggctgatgacgtcagcgttcgggctccatggc

SEQ ID NO: 292 - DNA, 242 bp, Antidorcas marsupialis
tgagcttccctccgccctacggcgaacaacacgggcaagcagcatttataatgagctcatacctaaagcaacataacggttacggtgacttcccacaagacattgcgacatgcaaatattttagtgtaccccgcccctggtagttccacgctaggacgcacacgcactccggttcccgcctttagactgcgctggcgattccagggagcgggctgatgacgtcagtgttcgggctccatggc

SEQ ID NO: 293 - DNA, 242 bp, Litocranius walleri
tgagcttccctccgccctacggcgaacaatgcgcgcaaacagcatttataatgcgctcatacttaaagcaactttacggttacggtgacttcccacaagacattgcgacatgcaaatattttagtgtatcccgcccctggtagttccacgctaggacgcacacgcactccggttcccgcctttagactgcgctggcgattccagggagcggactgatgacgtcagtgatcgggctccatggc

SEQ ID NO: 294 - DNA, 241 bp, Madoqua kirkii
tgagcttccctccgccctacggccaacagtcgcacaaacagcatttataatgagctcatacctacagcaactttacggttacggtgacttcccacaagacattgcgacatgcaaatattttagtgtattccgcccctggtagttccacgctaggacgcacacgcactgcggttcccgcctttagactgcgctggcgattccagggagcggactgatgacgtcagtgttcgggctccatggc

SEQ ID NO: 295 - DNA, 242 bp, Raphicerus campestris
tgagcttccctccgccctatggccaatagctcgcgcaaacagcatttataatgagctcatacctaaagcaactttacggttacggtgacttcccacaagacattgcgacatgcaaatattttagtatatcccgcccctggtagttccacgctaggacgcacacgcactgcggttcccgcctttagactgcgctggcgattccagggagcggactgatgacgtcagtgttcgggctccatggc

SEQ ID NO: 296 - DNA, 242 bp, Oryx gazella
tgagcttccctccgccctacggcaaacaatgcgagcaaacagcatttataatgagctcatacctaaagccacttttcggttacggtgacttcccacaagacattgcgatatgtaaatattttagtgcatcccgcccctggtagttccacgctaggacgcacacgcactacggttcccgcctttagattgcgctggcgattccagggagcggactgatgacgccagcgttcggactccatggc

SEQ ID NO: 297 - DNA, 242 bp, Oryx gazella; identical to SEQ ID NO: 296

SEQ ID NO: 298 - DNA, 242 bp, Oryx dammah; identical to SEQ ID NO: 296

SEQ ID NO: 299 - DNA, 240 bp, Hippotragus niger
tgagcttccctccgccctatggcaaacaatgcgcaaacagcatttataatgagctcatacctaaagccactttacggttacggtgacttcccacaagacattgcgatatgtaaatattttagtgcatcccgcccctggtagttccacgctaggacgcacacgcactacggttcccgcctttagattgcgctggcgattccagggagcggactgatgacgtcagcgttcgggctccatggc

SEQ ID NO: 300 - DNA, 242 bp, Nanger granti
tgagcttccctccgccctacggcaaacaacgcgcgcaaacagcatttataatgagctcatacctaaagcaacttttcggttacggtgacttcccacaagccattgcgacatgcaaatgtcttagtatatcccgcccctggtagttccacgctaggacgcacacgcactccggttcccgcctttagactgcgccggcgattccggggagcgggctgatgacgtcagtgttcgggctccatggc

SEQ ID NO: 301 - DNA, 242 bp, Eudorcas thomsonii
tgagcttccctccgccctacggcaaataacgcgcgcaaacagcatttataatgagctcatacctaaagcaatttttcggttacggtgacttcccacaagccattgcgacatgcaaatattttagtgtatcccgcccctggtaggtccacgctaggacgcacgcgcactccggttcccgcctttagacggcgctggcgattccggggagcgggctgatgacgtcagtgttcgggctccatggc

SEQ ID NO: 302 - DNA, 241 bp, Kobus leche
tgagcttccctccgccctacgcaaataccacgcgcaaacagcatttataaggcgctcaaacctaaagccactttacggttacggtgacttcccacaagacattgcgacatgcaaatatcttagtgcatcccgcccctggtagttccacgctgggacgcacacgcaccacggttcccgcctttagactgcactggcgattccagggagcgggctgatgacgtcagcgttcgggctccatggc

SEQ ID NO: 303 - DNA, 241 bp, Oreamnos americanus
gagcttccctccgccctacggcaaacaatgcgcgcaaaaagcatttataatgagctcatacctaaagccactttacggttacggtgacttcccacaagacattgcggcatgcaaatattttagtgcatcccgcccctagtagttccacgctaggacgcacacgcactacggttcccgcctttagactgcgctgccgattccaacgagcggactgatgacgtcagcgtttgggctccatggc

SEQ ID NO: 304 - DNA, 242 bp, Beatragus hunteri
tgagcttccctccgccctacggcagacaatgcgtgcgcacagcacttataatgcgctcacacctaaagccacttttcagttacggtgacttcccacaagacattgcgatatgcaaatattttagcgcatcccgcccctggtagttccacgcgaggacgcacacgcactacggttcccgcctttagacttcgctggcgattccagggagcggcctgatgacgtcagcgttcgggctccatggc

SEQ ID NO: 305 - DNA, 242 bp, Damaliscus lunatus
tgagcttccctccgccctacggcaaacaatgcgtgcacacagcacttataatgcgctcacacctaaagccacttttcagttacggtgacttcccacaagacattgcgatatgcaaatattttagcgcgtcccgcccctggtagttccacgcgaggacgcacacgcactacggttcccgcctttagactgcgctggcgattccagggagcggcctgatgacgtcagcgttcgggctccatggc

SEQ ID NO: 306 - DNA, 242 bp, Damaliscus lunatus
tgagcttccctccgccctacggcaaacaatgcgtgcacacagcacttataatgcgctcacacctaaagccacttttcagttacggtgacttcccacaagacattgcgatatgcaaatattttagcgcatcccgcccctggtagttccacgcgaagacgcacacgcactacggttcccgcctttagactgcgctggcgattccagggagcggcctgatgacgtcagcgctcgggctccatggc

SEQ ID NO: 307 - DNA, 242 bp, Connochaetes taurinus
tgagcttccctccgccctacggcagacaatgcgtgcacagagcatttataatgcgctcacacctaaagccacttttcagttacggtgacttcccacaagacattgcgatatgcaaatattttagcgcgtcccgcccctggtagttccacgcgaggacgcacacgcactacggttcccgcctttagactgcgctggcgattccagggagcggcctgatgacgtcagcgttcgggctccatggc

SEQ ID NO: 308 - DNA, 242 bp, Aepyceros melampus
tgagcttccctccgccctacgccaaactgtgcgcccaaacagcgtttataatgcgctcatacctaaagctacttttcggttacggtgacttcccacaagacattgcgacatgcaaatattttagtgcgtcccgcccctggtagttccatgctaggacgcacacgcactacggttcccgcctttagactgcgctggcgattcctgggagcgggctgatgacgtcagcgctcgggctccatggc

SEQ ID NO: 309 - DNA, 242 bp, Pantholops hodgsonii
tgagcttccctccgccctacggcaaacgactcccgcaaacagcatttataatgcgctcatacataaagccacttttcggttacggtgacttcccacaagacattgcgacatgcaaatattttagtgcatcccgcccctggtagctccacgctaggacgcacacgcactacggttcccgcctttagactgccggggcgattccagggagcggactgatgacgtcagcgttcggactccatggc

SEQ ID NO: 310 - DNA, 242 bp, Neotragus moschatus
tgagcttccctccgccctacggcaaacagtgcccacaaacagcatttataatgagctcatacctaaagccacttttcggttacggtgacttcccacaagacattgcaatatgcaaatattttagtgcgtccggcccctggtagttccacgctaggacgcacacgcactacagttccggcctttagactcctctggcgattcctgggagcggactgatgacgtcagcgttcgggctccatggc

SEQ ID NO: 311 - DNA, 237 bp, Ourebia ourebi
tgagcttccctccgccctgtgacaaacaacgcccgcaaacagcatttataacgagctcatacctaaagcaactttacggttacggtgacttcccacaagacattgcgacatgcaaatattttaatgtatcccgcccctagtagtttcacgctaggacgcacacgcactacggttcccgcctttagactgcgctggcgattccagggagcggactgatgacgtcagtgttcgggctcc

SEQ ID NO: 312 - DNA, 242 bp, Saiga tatarica
tgagcttccctccgccctacggcgaacaacgcgcgcaaacagcgtttataatgagctcatacctaaagcaactttacggttacggtgacttcccacaagccattgcgacatgcaaatattttggtgtatcccgcccctggtagttccacgctagggcggacacgccccgcggtccccgcctttagcctgcgctggcgattccagggagcgggctgatgacgtcagcgcccgggctccatggc

SEQ ID NO: 313 - DNA, 242 bp, Bubalus bubalis
tgagcttccctccgccctatggcaagcgagtcgcgcaaacagcatttataatggctcatacctagagccacttttcggttacggtgacttctcacaagacattgggacatgcaaatattacagtgcgtcccgcccctggttagttctacgctaggacgcacacgcactacggttcccgcctttagactgcgctggcggttcctgggagcggactgatgacgtcagtgttcgggatccatggc

SEQ ID NO: 314 - DNA, 242 bp, Bubalus bubalis; identical to SEQ ID NO: 313

SEQ ID NO: 315 - DNA, 242 bp, Bubalus bubalis; identical to SEQ ID NO: 313

SEQ ID NO: 316 - DNA, 242 bp, Bubalus bubalis; identical to SEQ ID NO: 313

SEQ ID NO: 317 - DNA, 242 bp, Bubalus bubalis; identical to SEQ ID NO: 313

SEQ ID NO: 318 - DNA, 242 bp, Syncerus caffer
tgagcttccctccgccctatagcaaacaatccgggcaaacagcatttataatgcgctcatacctagagccacttttcggttatggtgacttctcacaagacattgggacatgcaaatattacagcgcgtcccgcccctggtagttctacgctaggacgcacacgcactacggttcccgcctttagactgcgctggcggttcctgggagcggactgatgacgtcagtgttcgggatccatggc

SEQ ID NO: 319 - DNA, 242 bp, Syncerus caffer
tgagcttccctccgccctatagcaaacaatccgggcaaacagcatttataatgcgctcatacctagagccacttttcggttatggtgacttctcacaagacattgggacatgcaaatattacagtgcgtcccgcccctggtagttctacgctaggacgcacacgcactacggttcccgcctttagactgcgctggcggttcctgggagcggactgatgacgtcagtgttcgggatccatggc

SEQ ID NO: 320 - DNA, 242 bp, Syncerus caffer; identical to SEQ ID NO: 319

SEQ ID NO: 321 - DNA, 243 bp, Bos indicus
tgagcttccctccgccctacggcaaacaccgcacgcaaatagcacttataatgtgctcatacctagagccacttttcggttacggtgacttctcaaaaagacagtgggacatgcaaatattacagtgcgtcccgcccctggtaggtctacgctaggacgcacgcgcactacggttcccgcctatagactgcgctggcgattcctgggagcggactgatgacgtcagcgttcgggatccatggc

SEQ ID NO: 322 - DNA, 243 bp, Bos sp.; identical to SEQ ID NO: 321

SEQ ID NO: 323 - DNA, 243 bp, Bos sp.; identical to SEQ ID NO: 321

SEQ ID NO: 324 - DNA, 243 bp, Bos sp.; identical to SEQ ID NO: 321

SEQ ID NO: 325 - DNA, 243 bp, Bos sp.; identical to SEQ ID NO: 321

SEQ ID NO: 326 - DNA, 243 bp, Bos indicus
tgagcttccctccgccctacggcaaacaccgcacgcaaatagcacttataatgtgctcatacctagagccacttttcggttacggtgacttctcaaaaagacagtggracatgcaaatattacagtgcgtcccgcccctggtaggtctacgctaggacgcacgcgcactacggttcccgcctatagactgcgctggcgattcctgggagcggactgatgacgtcagcgttcgggatccatggc

SEQ ID NO: 327 - DNA, 243 bp, Bos sp.
tgagcttccctccgccctacggcaaacaccgcacgcaaatagcacttataatgtgctcatacctagagccacttttcggttacggtgacttctcaaaaagacagtggaacatgcaaatattacagtgcgtcccgcccctggtaggtctacgctaggacgcacgcgcactacggttcccgcctatagactgcgctggcgattcctgggagcggactgatgacgtcagcgttcgggatccatggc

SEQ ID NO: 328 - DNA, 243 bp, Bos sp.; identical to SEQ ID NO: 327

SEQ ID NO: 329 - DNA, 243 bp, Bos sp.; identical to SEQ ID NO: 327

SEQ ID NO: 330 - DNA, 243 bp, Bos sp.; identical to SEQ ID NO: 327

SEQ ID NO: 331 - DNA, 243 bp, Bos sp.; identical to SEQ ID NO: 327

SEQ ID NO: 332 - DNA, 243 bp, Bos taurus; identical to SEQ ID NO: 327

SEQ ID NO: 333 - DNA, 243 bp, Bos taurus; identical to SEQ ID NO: 327

SEQ ID NO: 334 - DNA, 244 bp, Bos taurus
tgagcttccctccgccctacggcaaacaccgcacgcaaatagcacttataatgtgctcatacctagagccacttttcggttacggtgacttctcaaaaagacagtgggaacatgcaaatattacagtgcgtcccgcccctggtaggtctacgctaggacgcacgcgcactacggttcccgcctatagactgcgctggcgattcctgggagcggactgatgacgtcagcgttcgggatccatggc

SEQ ID NO: 335 - DNA, 242 bp, Bos mutus
tgagcttccctccgccctatgccaaacaccgcccgcaaatagcatttataatgtgctcatacctagagccacttttcgattacggtgacttctcaaaagacagtgggacatgcaaatattacagtgcgtcccgcccctggtaggtctacgctaggacgcacgcgcactacggttcccgcctatagactgcgctggcgattcctgggagcggactgatgacgtcagcgttcgggatccatggc

SEQ ID NO: 336 - DNA, 242 bp, Bos sp.
tgagcttccctccgccctataccaaacaccgcccgcaaatagcatttataatgtgctcatacctagagccacttttcgattacggtgacttctcaaaagacagtgggacatgcaaatattacagtgcgtcccgcccctggtaggtctacgctaggacgcacgcgcactacggttcccgcctatagactgcgctggcgattcctgggagcggactgatgacgtcagcgttcgggatccatggc

SEQ ID NO: 337 - DNA, 242 bp, Bos mutus
tgagcttccctccgccctatgccaaacaccgcccgcaaatagtatttataatgtgctcatacctagagccacttttcgattacggtgacttctcaaaagacagtgggacatgcaaatattacagtgcgtcccgcccctggtaggtctacgctaggacgcacgcgcactacggttcccgcctatagactgcgctggcgattcctgggagcggactgatgacgtcagcgttcgggatccatggc

SEQ ID NO: 338 - DNA, 242 bp, Bison bison
tgagcttccctccgccctatggcaaacaccgcacgcaaatagcatttataatgtgctcatacctagagccacttttcggttacggtgacttctcaaaagacagtgggacatgcaaatattacagtgcgtcccgcccctggtaggtctacgctaggacgcacgcgcactacggttcccgcctatagactgcgctggcgattcctgggagcggactgatgacgtcagcgttcgggatccatggc

SEQ ID NO: 339 - DNA, 242 bp, Bos frontalis
tgagcttccctccgccctatggcaactaaggcccgcaaacagcatttataatgtgctcatacctagagtcacttttcggttacggtgacttctcacaagagactgggacatgcaaatattacagtgcgtcccgcccctggtagttctacgctaggacgcacgcgcactacggttcccgcctatagactgcgctggcgattcctgggagcggactgatgacgtcagcattcgagatccatggc

SEQ ID NO: 340 - DNA, 242 bp, Bos gaurus
tgagcttccctccgccctatggcaactaaggcgcgcaaacagcatttataatgtgctcatacctagagtcacttttcggttacggtgacttctcacaagagactgggacatgcaaatattacagtgcgtcccgcccctggtagttctacgctaggacgcacgcgcactacggttcccgcctatagactgcgctggcgattcctgggagcggactgatgacgtcagcattcgagatccatggc

SEQ ID NO: 341 - DNA, 241 bp, Tragelaphus scriptus
tgagcttccctccgccctatgccaaacacgcgcgcaaacagcatttataatgcactcataagtagagccacttttcggttatggtgacttctcacaaggaattggaacatgcaaatattacagtgcgtcccgcccctagtagttctgcgctaggacgcagacgcactacggttcccgcctttagaccgcgctggcgattcctgggagcggactgatgacgtcagcgttcgggatccatggc

SEQ ID NO: 342 - DNA, 241 bp, Tragelaphus buxtoni
tgagcttccctccgccctatgccaaacacgcgcgcaaacagcatttataatgcactcataagtagagccacttttcggttatggtgacttctcacaaggaattgggacatgcaaatattgcagtgcgtcccgcccctggtagttctgcgctaggacgcagacgcactacggttcccgcctttagactgcgctggcgattcctgggagcggactgatgacgtcagcgttcgggatctatggc

SEQ ID NO: 343 - DNA, 241 bp, Tragelaphus oryx
tgagcttccctccgccctacgccaattctgcgcgcaaacagcatttataatgcactcataagtagagccacttttcggttatggtgacttctcacaaggaattgggacatgcaaatattacagtgcgtcccgcccctggtagttctgcgctaggacgcagacgcactgcggttcccgcctttagactgcgctggcgattcctgggagcggactgatgacgtcagcgttcgggatccatggc

SEQ ID NO: 344 - DNA, 238 bp, Tragelaphus strepsiceros
tgagcttccctccgccctatgccaaacgcgcgaaacagcatttataatgcactcataagtagagccacttttcgattatggtgacttctcacaaggaattgggacatgcaaatattacagtgcgtcccgcccctggtagttctgtgctaggacgcagacgcagtacggttcccgcctttagactgcgctggcgattcctgggagcggactgatgacgtcagcgttcgggatccatggc

SEQ ID NO: 345 - DNA, 241 bp, Cephalophus harveyi
tgagcttccctccgccctatgccaaacaacgcgcgcaaacagcatttataatgcactcataagtagagccactttcggttatggtgacttctcacaaggaattgggacatgcaaatattacagtgcgtcccgcccctggtagttctgcgctaggacgcagacgcactacggttcccgcctttagaccgcgctggcgattcctgggagcggactgatgacgtcagcgttcgggatccatggc

SEQ ID NO: 346 - DNA, 241 bp, Tragelaphus imberbis
tgagcttccctccgccctatgccaaacaacgcgcgcaaacagcatttataatgcactcataagtagagccactttcggttatggtgacttctcacaaggaattgggacatgcaaatattacagtgcgtcccgcccctggtagttctgcgcaaggacgcagacgcactacggttcccgcctttagactgcgctggcgattcttgggagcggactgatgacgtcagcgttcgggatccatggc

SEQ ID NO: 347 - DNA, 238 bp, Tragelaphus eurycerus
tgagcttccctccgccctatgccaaacaacgctcgcaaacagcatttataatgcactcataagtagagccacttttcggttatggtgacttctcacaaggaattgggacatgcaaatattacagtgcgtcccgcccctggtagttctacggacgcagacgcactacggttcccgcctttagattgcgctggcgattcctgggagcggactgatgacgtcagcgttcgggatccatggc

SEQ ID NO: 348 - DNA, 238 bp, Tragelaphus spekii
tgagcttccctccgccctatgccaaacaacgcgcgtaaacagcatttataatgcactcataagtagagccacttttcggttatggtgacttctcacaaggaattgggacatgcaaatattacagtgcgtcccgcccctggtagttctacggacgcagacgcactacggttcccgcctttagactgcgctggcgattcctgggagcggactgatgacgtcagcgttcgggatccatggc

SEQ ID NO: 349 - DNA, 242 bp, Giraffa tippelskirchi
tgagcttccctccgccctatagcaaacagcgcgcacaaccagcatttataatgcgctcgtacctaaaggcacttgtcggttacggtgacttcccataagacattgcgacatgcaaatactatagtgcgtcccgcccctggtagttccacgctgggacgcacacacagtacggttcccgcctttagactgcgctggcgattcctgggagaggattgatgacgtcagcgctcgggctccatggc

SEQ ID NO: 350 - DNA, 242 bp, Giraffa camelopardalis; identical to SEQ ID NO: 349

SEQ ID NO: 351 - DNA, 242 bp, Giraffa tippelskirchi; identical to SEQ ID NO: 349

SEQ ID NO: 352 - DNA, 241 bp, Okapia johnstoni
tgagcttccctccgccctatggcaaatactgcgcgcaaccagcgtttataatgcgctcgtacctaaaggcacttatcggttacggtgacttcccacaagacattgcgacatgcaaatactacatgcgtcccgcccctggcagttccacgctgggacgcacacgcagtacggttcccgcctttagactgcactggcgattcctgggagaggattgatgacgtcagcgttcgggctccatggc

SEQ ID NO: 353 - DNA, 241 bp, Sylvicapra grimmia
tgagcttccctccgccctatagcacaaaacgcgggcaaacagcatttataatgcgctcatgcctaaagccactttacggttacggtgacttcccacaagacattgcgacatgcaaatattttagtgcgtcccgccctggtagttccacgctaggacacacacgcactatgcttccggcctttagactgcgccggtgattccaaggagcggactgatgacgtcagcgttccggctccatggc

SEQ ID NO: 354 - DNA, 242 bp, Cephalophus harveyi
tgagcttccctccgccctacggcctagagagcgggcaaacagcatttataatgagctcatacctaaaggcactctacggttacggtgacttcccacaagacattgcgacatgcaaatattttagtgcgtcccgcccctggtagttccacgctaggacacacacgcactatgcttccggcctttagactgcgccagtgattccagggagcggactgatgacgtcagcgttccggctccatggc

SEQ ID NO: 355 - DNA, 242 bp, Philantomba maxwellii
tgagcttccctccgccctacgccagaaagcgtaggcaaacagcattaataacgagctgatacctaaagtcactttacggttacggtgacttcccacaagacattgcgacatgcaaatatttcagtgcgtcccgcccctggtagttccccgctaggacacaaacgcactgtggttccgacctttagactgcgccggtgattccagggagcggactgatgacgtcagcgttcgggctccatggc

SEQ ID NO: 356 - DNA, 242 bp, Neotragus pygmaeus
tgagcttccctccgccctatggcaagcaaccctcgcaaacagcgtttataatgcgctcatacctaaactgactttacggttacggtgacttcccacaagacattgcgacatgcaaatattttagtgcgtcccgcccctgatagttccaagctagaacccacacgcactgaggttcccgcccttagactgcgctggcgattccagggagcggactgatgacgtaagcgttcgggcgccatggc

SEQ ID NO: 357 - DNA, 242 bp, Capreolus capreolus
tgagcttcccgccgccccgtggcgagtaacacgcgcaaagagcatttataacgcgctcagacctaaagccacttgtcgcttacggtgacttcccataagacattgcaatatgcaaatactccagtgcgtcccgcccctggcagttccacgctgggacgtgcacgcactacggttcccgcctttagactgcgctcgcgattcccgggagagggctgatgacgtcagcgttcgggctccatggc

SEQ ID NO: 358 - DNA, 242 bp, Capreolus pygargus
tgagcttcccgccgccccgtggcgagtaacacgcgcaaagagcatttataacgcgctcagacctaaagccacttgtcgcttacggtgacttcccataagacattgcaatatgcaaatactccagtgcgtcccgcccctggcagttccacgctgggacgtgcacgcactacggttcccgcctttagactgcgctcgcgattcctgggagagggctgatgacgtcagcgttcgggctccatggc

SEQ ID NO: 359 - DNA, 242 bp, Hydropotes inermis
tgagcttcccgccgccccgtggcgaacaacacgcgcaaagagcatttataacgcgctcagacctaaagccatttgtcgcttacggtgacttcccataagacattgcaatatgcaaatactccagtgcgtcccgcccctggcagttccacgctgggacgtgcacgcactacggttcccgcctttagactgcgctcgcgattcctgggagagggctgatgacgtcagcgttcgggctccatggc

SEQ ID NO: 360 - DNA, 242 bp, Muntiacus crinifrons
tgagcttcccgccgccccatggcgaaaatcacgcgcaaagagcatttataacgtgctcagacctaaagccactggtcgcttacggtgactccccataagacattgcgatatgcaaatactgcagtgcgtcccgcccctggcagttccacgctgggacgtacacgtactacggttcccgcctttagactgcgctcgcgattcctgggagagggctgatgacgtcagcgttcgggctccatggc

SEQ ID NO: 361 - DNA, 242 bp, Muntiacus muntjak
tgagcttcccgccgccccatggcgaaaatcacgcgcaaagagcatttataacgtgctcagacctaaagccacttgtcgcttacggtgactccccataagccattgcgatatgcaaatactgcagtgcgtcccgcccctggcagttccacgctgggacgtacacgtactacggttcccgcctttagactgtgctcgcgattcctgggagagggctgatgacgtcagcgttcgggctccatggc

SEQ ID NO: 362 - DNA, 242 bp, Muntiacus reevesi
tgagcttcccgccgccccatggcgaaaaacacgcgcaaagagcacttataacgtgctcagacctaaagccacttgtcgcttacggtgactccccataagacattgcgatatgcaaatactgtagtgcgtcccgcccctggcagttccacgctgggacgtgcacgcactacggttcccgcctttagactgcgctcgcgattcctgggagagggctgatgacgtcagcgttcgggctccatggc

SEQ ID NO: 363 - DNA, 242 bp, Muntiacus muntjak
tgagcttcccgccgccccatggcgaaaaacacgcgcaaagagcacttataacgtgctcagacctaaagccacttgtcgcttacggtgacttcccataagacattgcgatatgcaaatactgtagtgcgtcccgcccctggcagttccacgctgggacgtgcacgcactacggttcccgcctttagactgcgctcgcgattcctgggagagggctgatgacgtcagcgttcgggctccatggc

SEQ ID NO: 364 - DNA, 242 bp, Muntiacus muntjak; identical to SEQ ID NO: 363

SEQ ID NO: 365 - DNA, 242 bp, Muntiacus muntjak
tgagcttcccgccgccccatggcgaaaaacacgcgcaaagagcatttataacgtgctcagacctaaagccacttgtcgcttacggtgacttcccataagacattgcgatatgcaaatactgtagtgcgtcccgcccctggcagttccacgctgggacgtgcacgcactacggttcccgcctttagactgcgctcgcgattcctgggagagggctgatgacgtcagcgttcgggctccatggc

SEQ ID NO: 366 - DNA, 242 bp, Muntiacus reevesi
tgagcttcccgccgccccatggcgaaaaacacgcgcaaagagcatttataacgtgctcagacctaaagccacttgtcgcttacggtgacttcccataagacattgcgatatgcaaatactgcagtgcgtcccgcccctggcagttccacgctgggacgtgcacgcactacggttcccgcctttagactgcgctcgcgattcctgggagagggctgatgacgtcagcgttcgggctccatggc

SEQ ID NO: 367 - DNA, 239 bp, Muntiacus crinifrons
tgagcttcccgccgccccatggcgaaaacacgcgcaaagagcatttataacgtgctcagacctaaagccacttcgcttacggtgactccccataagacattgcgatatgcaaatactgcagtgcgtcccgcccctggcagttccacgctgggacgtgcacgcactacggttcccgcctttagactgcgctcgcgattcctgggagagggctgatgacgtcagcgttcgggctccatggc

SEQ ID NO: 368 - DNA, 242 bp, Cervus elaphus
tgagcttcccgccgccccacggcgaaaaacacgcgcaaagagcgtttataatgcgctcagacctaaagtaacttgtcacttacggtgacttcccataagacattgcgatatgcaaatattccagtgcgtcccgcccctggcagttccacgcggggacgtgcacgcactacggttcccgcctttagactgcgctggcgattcctgggagagggctgatgacgtcagcgtgcgggctccatggc

SEQ ID NO: 369 - DNA, 242 bp, Cervus albirostris
tgagcttcccgccgccccacggcgaaaaacacgcgcaaagagcgtttataatgcgctcagacctaaagtaacttgtcacttacggtgacttcccataagacactgcgatatgcaaatattccagtgcgtcccgcccctggcagttccacgccgggacgtgcacgcactacggttcccgcctttagactgcgctggcgattcctgggagagggctgatgacgtcagcgtgcgggctccatggc

SEQ ID NO: 370 - DNA, 242 bp, Cervus hanglu
tgagcttcccgccgccccacggcgaaaaacacgcgcaaagagcgtttataatgcgctcatacctaaagtaacttgtcacttacggtgacttcccataagacattgcgatatgcaaatattccagtgcgtcccgcccctggcagttccacgccgggacgtgcacgcactacggttcccgcctttagactgcgctggcgattcctgggagagggctgatgacgtcagcgtgcgggctccatggc

SEQ ID NO: 371 - DNA, 242 bp, Elaphurus davidianus
tgagcttcccgccgccccacggcgaaaagcacgcgcaaagagcgtttataacgcgctcagacctaaagctacttgtcacttacggtgacttcccataagacattgcgatatgcaaatattccagtgcgtcccgcccctggcagttccacgctgggacgtgcacgcactacgcttcccgcctttagactgcgctggcgattcctgggagagggctgatgacgtcagcgtgcgggctccatggc

SEQ ID NO: 372 - DNA, 242 bp, Axis porcinus
tgagcttcccgccgccccacggcgaaatacacgcgcaaagagcgtttataacgcgctcagacctaaaggtacttgtcacttacggtgacttcccataagacattgcgatatgcaaatattccagtgcgtcccgcccctggcagttccacgctgggacgtgcacgcactacggttcccgcctttagactgcgctggcgattcctgggagagggctgatgacgtcagcgttcgggctccatggc

SEQ ID NO: 373 - DNA, 241 bp, Alces alces
tgagcttcccgccgccccatggcggaaaatacgctcaaagagcatttataacgcgctcagacctaagtcacttgtcgcttacggtgacttcccataagacattgcgatatgcaaatacgacagtgcgtcccgcctctagcagttccacgctgggacgtgcacgcactacggttcccgcctttagactgcgcttgcgattcctgggagagggctgatgacgtcagcgttcgggctccatggc

SEQ ID NO: 374 - DNA, 241 bp, Alces alces; identical to SEQ ID NO: 373

SEQ ID NO: 375 - DNA, 242 bp, Odocoileus hemionus
tgagcttcccgccgccccacggaggataacgcgcgcaaagagcatttataatgcgcgcagacctaaagccacttgtcgcttacggtgacttcccataagacattgcgatatgcaaatattacagtgcgtcccgcccctggcagttccacgctgggacgtgcacgcgctacggttcccgcctttagactgcgctggcgattcctgggagcgggctgatgacgtcagcattcgggctccatggc

SEQ ID NO: 376 - DNA, 242 bp, Odocoileus hemionus
tgagcttcccgccgccycacgaaggataacgcgcgcaaagagcatttataatgcgcgcagacctaaagccacttgtcgcttacggtgacttcccataagacattgcgatatgcaaatattacagtgcgtcccgcccctggcagttccacgctgggacgtgcacgcgctacggttcccgcctttagactgcgctggcgattcctgggagcgggctgatgacgtcagcattcgggctccatggc

SEQ ID NO: 377 - DNA, 242 bp, Odocoileus virginianus
tgagcttcccgccgccccacggaggataacgcgcgcaaagagcatttataatgcgcgcagacctaaagccacttgtcgcttacggtgacttcccataagacattgcgatatgcaaatattacagtgcgtcccgcccctggcagttccacgctgggacgtgcacgcgctacggttcccgcctttagactgcgccggcgattactgggagcgggctgatgacgtcagcattcgggctccatggc

SEQ ID NO: 378 - DNA, 242 bp, Odocoileus virginianus
tgagcttcccgccgccccacggaggataacacgcgcaaagagcatttataatgcgcgcaaacctaaagccacttgtcgcttacggtgacttcccataagacattgcgatatgcaaatattacagtgcgtcccgcccctggcagttccacgctgggacgtgtacgcgctacggttcccgcctttagactgcgctggcgattcctgggagcgggctaatgacgtcagcattcgggctccatggc

SEQ ID NO: 379 - DNA, 242 bp, Rangifer tarandus
tgagcttcccgccgccccatggaggagaacgcgcgcaaaaagcatttataatgcgcgcagacctaaagccacttgtcgcttacggtgacttcccataagacattgcgagatgcaaatattacagtgtgtcccgcccctggcagttccacgctgggacgtgcacgcgctacggttcccgcctttagactgcgctggcgattcctgggagaggactgatgacgtcagcattcgggctccatggc

SEQ ID NO: 380 - DNA, 242 bp, Rangifer tarandus
tgagcttcccgccgccccatggaggagaacgcgcgcaaaaagcatttataatgcgcgcagacctaaagccacttgtcgcttacggtgacttcccataagacattgcgagatgcaaatattacagtgtgtcccgcccctggcagttccacgctgggacgtgcacgcgctacggttcccgcctttagactgtgctggcgattcctgggagaggactgatgacgtcagcattcgggctccatggc

SEQ ID NO: 381 - DNA, 238 bp, Procapra przewalskii
tgagcttccctccgccctacagctaaaactgcgcgcacacagtatttataatgagctcatgcataaagcaactttacggttacggtgacttcccacaagacattgcgacatgcaaatattttagtatatcccgcccctggtagttccacggacgcacacgcagtacggttcccgcctttagactgtgctggcgagtccagggagcgggctgatgacgtcagcgcccgggctccatggc

SEQ ID NO: 382 - DNA, 242 bp, Antilocapra americana
tgagcttccctccgccctatggcaaacgctgcgctcaaagagcgtttataatgcgctcacacccgaagccacttgtcgcttacggtgacttcccacaaggcattgcgatatgcaaatacggcggtgcgtcccgcccttggtcgttccacgctgggacgcacacgcacgacgattcccgcctttagactgcgccggcgattcccgcgagaggaccggtgacgtcagcgttcgggctccatggc

SEQ ID NO: 383 - DNA, 242 bp, Antilocapra americana
tgagcttccctccgccctatggcaaacgctgcgctcaaagagcgtttataatgtgctcacacccgaagacacttgtcgcttacggtgacttcccacaaggcattgcgatatgcaaatacggcggtgcgtcccgcccttggtcgttccacgctgggacgcacacgcacgacgattcccgcctttagactgcgccggcgattcccgcgagaggaccggtgacgtcagcgttcgggctccatggc

SEQ ID NO: 384 - DNA, 243 bp, Moschus moschiferus
tgagcttccctccgccctatggtaaaggccgcgcgcaaagagtatttataatgtgctcatagtgaaagccacttgacggttatggtgacttcccacaagacattgcgatatgcaaatattacagtgcgtcccgccccctggtcgttccacgctaggacgcacacgcacttcagttcccgcctttagactgcgcaggcgattcctgggagcgggctgatgacgtcagcgttcgggctccatggc

SEQ ID NO: 385 - DNA, 243 bp, Moschus moschiferus; identical to SEQ ID NO: 384

SEQ ID NO: 386 - DNA, 243 bp, Moschus berezovskii
tgagcttccctccgccctatggtaagggccgcgcgcaaagagtatttataacgtgctcatagtgaaagccacttgacggttatggtgacttcccacaagacattgcaatatgcaaatattacagtgcgtcccgccccctggtcgttccacgctaggacgcacacgcacttcagttcccgcctttagactgcgcaggcgattcctgggagcgggctgatgacgtcagcgttcgggctccatggc

SEQ ID NO: 387 - DNA, 243 bp, Moschus berezovskii; identical to SEQ ID NO: 386

SEQ ID NO: 388 - DNA, 243 bp, Moschus chrysogaster; identical to SEQ ID NO: 386

SEQ ID NO: 389 - DNA, 251 bp, Bubalus bubalis
tgagcttccctccgccctacggcaaacgaccgtcgcgcaaacaggagcacttataatgtgctcatacctagagccactttcggttacggtgacttctcaaaagacattgggacatgcaaatattacagtgcgtcccgcccctagtggagttccacgctaggacgcacgcgcactacggttcccgcctataggcgactgcgctggcggttcctgggagcggactgatgacgtcagtgttcggaatccatggc

SEQ ID NO: 390 - DNA, 243 bp, Balaenoptera bonaerensis
tgagcttccctccgccctatgccgaaagtttagcgcaacctgcctttataaggctcccaaacctaaagacatttgtcggttatggtgacttcccgcaacacattgcgacatgcaaatactgcggagcgtacctcccctggcaactcctcgctgggacgcacgcgcgctgcgtgctcccgccttttgactgcgccggcgatacttgggagagggttgatgacgccagcgttctggctccatggc

SEQ ID NO: 391 - DNA, 243 bp, Eschrichtius robustus
tgagcttccctccgccctataccgaaagtttagttcaagctgcatttataaagctcccaaacctaaagacatttgtcggttatggtgacttcccgcaacacattgcgacatgcaaatactgcggagtgcacctcccctggcaactcctcgctgggacgcacgcgcgctgcgtgctcccgccttttgactgcgccggcgatacctgggagagggttgatgacgtcagcgttctggctccatggc

SEQ ID NO: 392 - DNA, 243 bp, Eschrichtius robustus; identical to SEQ ID NO: 391

SEQ ID NO: 393 - DNA, 243 bp, Eschrichtius robustus
tgagcttccctccgccctataccgaaagtttagttcaagctgcatttataaagctcccaaacctaaagacatttgccggttatggtgacttcccgcaacacattgcgacatgcaaatactgcggagtgcacctcccctggcaactcctcgctgggacgcacgcgcgctgcgtgctcccgccttttgactgcgccggcgatacctgggagagggttgatgacgtcagcgttctggctccatggc

SEQ ID NO: 394 - DNA, 243 bp, Megaptera novaeangliae
tgagcttccctccgccctatgccgaaagttcagctcaacctgcatttataaagctcccaaacctaaagatatttgtcagttatggtgacttcccgcaacacattgcgacatgcaaatactgcggagtgcacctcccctggcaactcctcgctgggacgcacgcgtgctgcgtgctcccgccttttgactgcgccggcgatacttgggagagggttgatgacgtcagcgttctggctccatggc

SEQ ID NO: 395 - DNA, 243 bp, Balaenoptera musculus
tgagcttccctccgccctatgccgaaagtttagctcaacctgcgtttataaggctcccaaacctaaagacatttgtcggttatggtgacttcccgcaacacattgcgacatgcaaatactgcggagtgcacctcccctggcaactcctcgccgggacgcacgcgcgctgcgtgctcccgccttttgactgcgccggcgatacttgggagagggttgatgacgtcagcgttctggctccatggc

SEQ ID NO: 396 - DNA, 243 bp, Balaenoptera musculus
tgagcttccctccgccctatgccgaaaatttagctcaacctgcatttataaggctcccaaacctaaagacatttctcggttatggtgacttcccgcaacgcattgcgacatgcaaatactgcggagtgcacctcccctggcaactcctcgctgggacgcacgcgcgctgcgtgctcccgccttttgactgcgccggcgatacttgggagagggttgatgacgtcagcgttctggctccatggc

SEQ ID NO: 397 - DNA, 240 bp, Balaenoptera physalus
tgagcttccctccgccctatgccgaaagtttagctcaagcatttataaggctcccacacctaaagacatttgtcggttatggtgacttcccgcaacacattgcgacatgcaaatactgcggagtgcacctcccctggcaactcctcgctgggacgcacgcgcgctgcgtgctcccgccttttgactgcgccggcgatacttgggagagggttgatgacgtcagcgttctggctccatggc

SEQ ID NO: 398 - DNA, 241 bp, Eubalaena japonica
tgagcttccctccgccctatgccgaaagtttacctcaagctgcatttataaggctcccaaacctaaagacatttgtcggttatggtgacttcccgcaacacattgcgacatgcaaattgcggagcgtacctcccctggcaactcctcgctgggacgcacgcgcgctgcgtgctcccgccttttgactgcgccggcggtacttgggagagggttgatgacgtcagcgttctggctccatggc

SEQ ID NO: 399 - DNA, 245 bp, Balaenoptera acutorostrata
tgagcttccctccgccctatgcggaaagtttagctcaacttgcattataaggctcccaaacctaaagacatttgtcggttatggtgacttcccgcaacacattgcgacatgcaaatactgcggagtgcacccccccccctggcaactcctcgctgggacgcacgcgcgctgcgtgctcccgccttttgactgcgccggcgatacttgggagagggttgatgacgtcagcattctggctccatggc

SEQ ID NO: 400 - DNA, 243 bp, Platanista minor
tgagcttccctccgccctatactcgaaatgtagctcgagccgcatttataaggctcccaagcctaaatacatttgtcgtttatggtgacttcccgcaacacattgcgacatgcaaatactgcggagcgtacctcccctggcaactcctcgctgggacgcacgcgcgctacgtgctcccgccttttgactgcgcgggcgatacttgggagagggttgatgacgtcagcgttctggctccatggc

SEQ ID NO: 401 - DNA, 243 bp, Phocoena phocoena
tgagcttcccgccgccctacaccgaaaaccaggctcaagccacatttataaggctcccaaagcgaaatacatttgtcggttatggtgacttcccgcaacacattgcgacatgcaaatactgcggagcgttcctcccctggcaactcctcgctgggacgcacgcgcactacgtgctcccgccttttgactgcgccggcgatacttgggagagagttgatgacgtcagcgttctggctccatggc

SEQ ID NO: 402 - DNA, 243 bp, Neophocaena asiaeorientalis
tgagcttcccgccgccctacgccgaaaaccaggctcaagccacatttataaggctcccaaagcgaaatacatttgacggttatggtgacttcccgcaacacattgcgacatgcaaatactgcggagcgttcctcccctggcaactcctcgctgggacgcacgcgcactacgtgctcccgccttttgactgcgccggcgatacttgggagagagttgatgacgtcagcgttctggctccatggc

SEQ ID NO: 403 - DNA, 243 bp, Phocoena sinus
tgagcttcccgccgccctacgctgaaaaccaggcgcaagccacatttataaggctcccaaagcgaaatacatttgtcgattatggtgacttcccgcaacacattgcgacatgcaaatactgcggagcgttcctcccctggcaactcctcgctgggacgcacgcgcactacgtgctcccgccttttgactgcgccggcgatacttgggagagagttgatgacgtcagcgttctggctccatggc

SEQ ID NO: 404 - DNA, 243 bp, Monodon monoceros
tgagcttcccaccgccctacgccgaaaaccagcctcaagccacatttataaggctcgcaaaccgaaatacatttgtcggttatggtgacttcccgcaacacattgcgacatgcaaatactgcggagcgttcctcccctggcaactcctcgctgggacgcaagcgcactacgtgctcccgccttttgactgcgcccgcgatacttgggagagggttgatgacgtcagcgttctggctccatggc

SEQ ID NO: 405 - DNA, 243 bp, Monodon monoceros
tgagcttcccaccgccctacgccgaaaaccagcctcaagccacatttataaggctcgcaaaccgaaatacatttgtcggttatggtgacttcccgcaacacattgcgacatgcaaatactgcggagcgttcctcccctggcaactcctcgctgggacgcaagcgcactacgtgctcccgccttttgactgcgccggcgatacttgggagagggttgatgacgtcagcgttctggctccatggc

SEQ ID NO: 406 - DNA, 243 bp, Monodon monoceros; identical to SEQ ID NO: 405

SEQ ID NO: 407 - DNA, 243 bp, Monodon monoceros; identical to SEQ ID NO: 405

SEQ ID NO: 408 - DNA, 243 bp, Delphinapterus leucas
tgagcttcccgccgccctacgctgaaaaccaggctcaagccacatttataaggctcgcaaaccgaaatacatttgtcggttatggtgacttcccgtaacacattgcgacatgcaaatactgcggagcgttcctcccctggcaactcctcgctgggacgcacgcgcactacgtgctcccgccttttgactgcgccggcgatacttgggagagggttgatgacgtcagcgttctggctccatggc

SEQ ID NO: 409 - DNA, 243 bp, Delphinapterus leucas; identical to SEQ ID NO: 408

SEQ ID NO: 410 - DNA, 243 bp, Delphinapterus leucas; identical to SEQ ID NO: 408

SEQ ID NO: 411 - DNA, 243 bp, Tursiops aduncus
tgagcttcccgccgccctacaccgaaaaccaggctcaaggcacatttataaggctcccaaatctaagtacatttgtcggttatggtgacttcccgcaccacattgcgacatgcaaatactgcggagcgtccctcccctggcaactcctcgctgggacgcacgcgcgctacgtgctcccgccttttgactgcgccggcgatacttgggagagggttgatgacgtcagcgttctggctccatggc

SEQ ID NO: 412 - DNA, 243 bp, Tursiops aduncus; identical to SEQ ID NO: 411

SEQ ID NO: 413 - DNA, 243 bp, Tursiops aduncus; identical to SEQ ID NO: 411

SEQ ID NO: 414 - DNA, 243 bp, Tursiops aduncus
tgagcttcccgccgccctacgccgaaaaccaggctcaagccacatttataaggctcccaaatctaagtacatttgtcggttatggtgacttcccgcaccacattgcgacatgcaaatactgcggagcgtccctcccctggcaactcctcgctgggacgcacgcgcgctacgtgctcccgccttttgactgcgccggcgatacttgggagagggttgatgacgtcagcgttctggctccatggc

SEQ ID NO: 415 - DNA, 243 bp, Tursiops truncatus; identical to SEQ ID NO: 414

SEQ ID NO: 416 - DNA, 243 bp, Tursiops truncatus; identical to SEQ ID NO: 414

SEQ ID NO: 417 - DNA, 243 bp, Tursiops truncatus; identical to SEQ ID NO: 414

SEQ ID NO: 418 - DNA, 243 bp, Tursiops truncatus; identical to SEQ ID NO: 414

SEQ ID NO: 419 - DNA, 243 bp, Tursiops truncatus
tgagctccccgccgccctacgccgaaaaccaggctcaagccacatttataaggctcccaaatctaagtacatttgtcggttatggtgacttcccgcaccacattgcgacatgcaaatactgcggagcgtccctcccctggcaactcctcgctgggacgcacgcgcgctacgtgctcccgccttttgactgcgccggcgatacttgggagagggttgatgacgtcagcgttctggctccatggc

SEQ ID NO: 420 - DNA, 243 bp, Sousa chinensis
tgagcttcccgccgccctacgctaaagaccaggctcaagccacatttataaggctcccaaagctaagtacatttgtcggttatggtgacttcccgcaccacattgcgacatgcaaatactgcggagcgtccctcccctggcaactcctcgctgggacgcacgcgcgctacgtgctcccgccttttgactgcgccggcgatacttgggagagggttgatgacgtcagcgttctggctccatggc

SEQ ID NO: 421 - DNA, 243 bp, Sousa chinensis; identical to SEQ ID NO: 420

SEQ ID NO: 422 - DNA, 243 bp, Lagenorhynchus obliquidens
tgagcttcccgccgccctacgccgaaaaccagcctcaagccacatttataaggctcccaaacctaagtacatttgtcggttatggtgacttcccgcaacacattgcgacatgcaaatactgcggagcgtccctcccctggcaactcctcgctgggacgcacgcgcgctacgtgctcccgccttttgactgcgccggcgatacttgggagagggttgatgacgtcagcgttctggctccatggc

SEQ ID NO: 423 - DNA, 243 bp, Globicephala melas
tgagcttcccgccgccctacgccgaaaaccaggctcaagccacatttataaggctcccaaacctaagtacatttgtcggttatggtgacttcccgcaacacattgcgacatgcaaatactgcggagcgttcctcctctggcaactcctcgctgggacgcacgcgcgctacgtgctcccgccttttgactgcgccggcgatacttgggatagggttgatgacgtcagcgttctggctccatggc

SEQ ID NO: 424 - DNA, 243 bp, Orcinus orca
tgagcttcccgccgccctacgccgaaaaccaggctcaagccacatttataaggctcccaaacctaaatacatttgtcggttatggtgacttcccgcaacacattgcgacatgcaaatactgcggagcgttcctcccctagcaactcctcgctgggacgcacgcgcgctacgtgctcccgccttttgaccgagccggcgatacttgggagagggttgatgacgtcagcgttctggctccatggc

SEQ ID NO: 425 - DNA, 243 bp, Lipotes vexillifer
tgagcttcccgccgccctgtggcgaaaaactagtttagtccacatttataaggctcccaaacctaaatacatttgtcggttatggtgacttcccgcaacacattgcgacatgcaaatactgcggagcgttcctcccctggcaactcctcgctgggacgcacgcgcgctacgtgatcccgccttttggctgcgccggcgatacttgggagagggttgatgacgtcagcgttctggctccatggc

SEQ ID NO: 426 - DNA, 243 bp, Inia geoffrensis
tgagcttcccgccgccctacgtcgaaaggtatactcaagccacatttataaggctcccaaacctaaatacatttgacggttatggtgacttcccgcaacacattgcgacatgcaaatactgaggagcgtacctcccctgacaactcctcgctgggacgcacgcgcgcttcgtgctcccgcctcttgactgcgccggcgacacttgggagagggttgatgacgtcaccgttctggctccatggc

SEQ ID NO: 427 - DNA, 242 bp, Pontoporia blainvillei
tgagcttcccaccgccctacgcggaaagtacggtcaagtcacatttataaggctcccaaacctaaatacatttctcgcttatggtgacttcccgcaacacattgcgacatgcaaatactgcggagcgtacctcccctggcaactcctagctgggacgcacgcgcgctacatgctcccgccttttgactgcaccggcgacgcttgggagagggttgatgacgtcagcgttctggctccatggc

SEQ ID NO: 428 - DNA, 242 bp, Pontoporia blainvillei; identical to SEQ ID NO: 427

SEQ ID NO: 429 - DNA, 243 bp, Kogia breviceps
tgagcttccctccgccctattccgaaaactgaactcgcagagtacttataaggctctcaagcctaaagacatttgtaggttatggtgacttcccgtaacacattgcgacatgcaaatactgcggagcgtacctcccctgacaactcctcgctgggacgcacgcgcgctacgtgctcccgcctttggactgagccggcgatacttgggagagggttgatgacgtcagcgttctggctccatggc

SEQ ID NO: 430 - DNA, 242 bp, Physeter catodon
tgagcttccctccgccctatgacaaaagggagcgcaaaccgtatttataaagctctcaagcctaaaggcatttgtaggttatggtgacttcccgcaacacattgcgacatgcaaatactgcggagcgtacctccccaggcaactcctcgctgggacgcacgcgcgctacgtgctcccgcctttggactgcgccggcgatacttgggagagggttgatgacgtcagcgttctggctccatggc

SEQ ID NO: 431 - DNA, 242 bp, Physeter catodon; identical to SEQ ID NO: 430

SEQ ID NO: 432 - DNA, 242 bp, Physeter catodon; identical to SEQ ID NO: 430

SEQ ID NO: 433 - DNA, 242 bp, Mesoplodon bidens
tgagcttctctccgccctatgccgaaagcttaccttcgcccgccttataaggctcccaaccctaaatacatttgtaggttatggtgacttcccgcaacacattgcgacatgcaaatactgcggagcgtacctcccctggaaactcctcgctgggacgcacgcgcattacgtgctcccgccttttgactgagccggcgatacttgggagagggttgatgacatcagcgttctggctccatggc

SEQ ID NO: 434 - DNA, 242 bp, Ziphius cavirostris
tgagcttccctccgccctacgtcgaaaccttattttcccccgccttataaggctcccaaacctaaatacatttgtacgttatggtgacttcccgcaacacattgcgacatgcaaatactgcggagcgtacctctcctggaaactcctcgctgggacgcacgcgcgttacgtcctcccgccttttgactgagccggcgatacttgggagaaggttgatgacgtcagcgttctggctccatggc

SEQ ID NO: 435 - DNA, 242 bp, Hippopotamus amphibius
tgagcttccctccgccctgacgcaaaagctgttggaagcagtatttataaggctccgaaacgtaaagacatttgtcagttacggtgacttcccacaacacattgcggcatgcaaataccacggagtgtacctcccctggccacgcctcgctgggacgcatgagcgctacgtgttcccgccttttgactgcgccggcgatacccgggagagggttgatgacgtcacctttcgggcaccatggc

SEQ ID NO: 436 - DNA, 242 bp, Hippopotamus amphibius
tgagcttccctccgccctgacgcaaaagctgtcagaagcagtatttataaggctccgaaacgtaaagacatttgtcggttacggtgacttcccacaacacattgcggcatgcaaataccacggagtgtacctcccctggccacgcctcgctgggacgcatgagcgctacgtgttcccgccttttgactgcgccggcgatacccgggagagggttgatgacgtcacctttcgggcaccatggc

SEQ ID NO: 437 - DNA, 258 bp, Vicugna pacos
tgagcttccctccgccctatgggaaagggtgggctcacgcagcctttataagactcccaaacttaaagacatttctcggttatggcgacttcccacaagacatagcgacatgcaaatactgcagacctgtggcgccgacccggtcctgtgcagccatctttacggctgggacgcacgcgcgctgcgtgttcccgccctgtgactgcgccggcgattactgggagaggattgatgacgtcaacgttcgggttccatggc

SEQ ID NO: 438 - DNA, 258 bp, Vicugna vicugna; identical to SEQ ID NO: 437

SEQ ID NO: 439 - DNA, 258 bp, Vicugna pacos; identical to SEQ ID NO: 437

SEQ ID NO: 440 - DNA, 258 bp, Lama guanicoe
tgagcttccctccgccctatgggaaagggtgggctcacgcagcatttataagactcccaaacttaaagacatttctcggttatggcgacttcccacaagacatagcgacatgcaaatactgcagacctgtggcgccgacccggtcctgtgcagccatctttacggctgggacgcacgcgcgctgcgtgttcccgccctgtgactgcgccggcgattactgggagaggattgatgacgtcaacgttcgggttccatggc

SEQ ID NO: 441 - DNA, 258 bp, Lama glama
tgagcttccctccgccctatgggaaagggtgggctcacgcagcatttataagactcccaaacttaaagacatttctcggttatggcgacttcccacaagacatagcgacatgcaaatactgcagacctgttgcgccgacccggtcctgtgcagccatctttacggctgggacgcacgcgcgctgcgtgttcccgccctgtgactgcgccggcgattactgggagaggattgatgacgtcaacgttcgggttccatggc

SEQ ID NO: 442 - DNA, 258 bp, Camelus dromedarius
tgagcttccctccgccctatgagagagggtgggctcacgccacctttataaggctcccaaacttaaagacatttctcggttatggcgacttcccacaacacatagcgacatgcaaatactgcagacctgtggcgccgacccggtcctgtgcagccatctttacggctgggacgcacgcgcgctgcgtgttcccgccctgtgactgcgccggcgattactgggagaggattgatgacgtcaacgttcaggttccatggc

SEQ ID NO: 443 - DNA, 258 bp, Camelus dromedarius; identical to SEQ ID NO: 442

SEQ ID NO: 444 - DNA, 258 bp, Camelus dromedarius
tgagcttccctccgccctatgagagagggtgggctcacgccacctttataaggctcccaaacttaaagacatttctcggttatggcgacttcccacaacacatagcgacatgcaaatactgcagacctgtggcgccgacccagtcctgtgcagccatctttacggctgggacgcacgcgcgctgcgtgttcccgccctgtgactgcgccggcgattactgggagaggattgatgacgtcaacgttcgggttccatggc

SEQ ID NO: 445 - DNA, 258 bp, Camelus ferus
tgagcttccctccgccctatgagaaagggtgggctcacgccacctttataaggctcccaaacttaaagacatttctcggttatggcgacttcccacaacacatagcgacatgcaaatactgcagacctgtggcgccgacccggtcctgtgcagccatctttacggctgggacgcacgcgcgctgcgtgttcccgccctgtgactgcgccggcgattactgggagaggattgatgacgtcaacgttcgggttccatggc

SEQ ID NO: 446 - DNA, 258 bp, Camelus ferus
tgagcttccctccgccctatgagaaagggtgggctcacgccacctttataaggctcccaaacttaaagacatttctcggttatggcgacttcccacaacacatagcgacatgcaaatactgcagacctgtggcgccgacccggtcctgtgcagccatctttaaggctgggacgcacgcgcgctgcgtgttcccgccctgtgactgcgccggcgattactgggagaggattgatgacgtcaacgttcgggttccatggc

SEQ ID NO: 447 - DNA, 258 bp, Camelus bactrianus; identical to SEQ ID NO: 446

SEQ ID NO: 448 - DNA, 245 bp, Tragulus javanicus
tgagcttccctccgccctatgcagaagggcgcactcaagccgtgtttatatcaagcccatgagcacagtcacttgcaggctacggtgactccccacaagccattgcgacatgcaaatactgcggcaggcccctcctcgggtaactccacgctgggacgcacgcgccctacgcgttcccgcctttactgacggcgccagcgattcccgggagatggttgatgacgtcggcgatcgggctccatggc

SEQ ID NO: 449 - DNA, 245 bp, Tragulus kanchil
tgagcttccctccgccctatgcagaagtgcgcactcaagccgtgtttatatcaagcccatgagcacagtcacttgcaggctacggtgactccccacaagccattgcgacatgcaaatactgcggcaggcccctcctcgggtaactccacgctgggacgcacgcgccctacgcgttcccgcctttactgacggcgccagcgattcccgggagatggttgatgacgtcggcgatcgggctccatggc

SEQ ID NO: 450 - DNA, 253 bp, Sus scrofa
tgagcttctctccgccctacgtaggaaaactgctcctgtgagcacttataaaactcccataagtagagagatttcatagttatggtgatttcccataagacattgcgacatgcaaatattgtggcgcgttcgtccccgtccggtgcaggcagcttcgctccaggacgcacgcgcaatacatgttcccgccttgagactgcgccggcagattcctaggaagtggttgatgacgtagatgttagggatccatggc

SEQ ID NO: 451 - DNA, 253 bp, Sus scrofa; identical to SEQ ID NO: 450

SEQ ID NO: 452 - DNA, 253 bp, Sus scrofa; identical to SEQ ID NO: 450

SEQ ID NO: 453 - DNA, 253 bp, Sus scrofa; identical to SEQ ID NO: 450

SEQ ID NO: 454 - DNA, 253 bp, Sus scrofa
tgagcttctctccgccctacgtagaaaaactgcttctgtgagcacttataaaactcccataagtagagagatttcatagttatggtgatttcccataagacattgcgacatgcaaatattgtggcgcgttcgtccccgtccggtgcaggcagcttcgctccaggacgcacgcgcaatacatgttcccgccttgagactgcgccggcagattcctaggaagtggttgatgacgtcgatgttagggatccatggc

SEQ ID NO: 455 - DNA, 253 bp, Sus scrofa
tgagcttctctccgccctacgtaggaaaactgcttctgtgagcacttataaaactcccataagtagagagatttcatagttatggtgatttcccataagacattgcgacatgcaaatattgtggcgcgttcgtccccgtccggtgcaggcagcttcgctccaggacgcacgcgcaatacatgttcccgccttgagactgcgccggcagattcctaggaagtggttgatgacgtcgatgttagggatccatggc

SEQ ID NO: 456 - DNA, 253 bp, Sus scrofa; identical to SEQ ID NO: 455

SEQ ID NO: 457 - DNA, 253 bp, Sus scrofa; identical to SEQ ID NO: 455

SEQ ID NO: 458 - DNA, 253 bp, Sus scrofa; identical to SEQ ID NO: 455

SEQ ID NO: 459 - DNA, 253 bp, Sus scrofa; identical to SEQ ID NO: 455

SEQ ID NO: 460 - DNA, 253 bp, Sus scrofa; identical to SEQ ID NO: 455

SEQ ID NO: 461 - DNA, 253 bp, Sus scrofa; identical to SEQ ID NO: 455

SEQ ID NO: 462 - DNA, 253 bp, Sus scrofa
tgagcttctctccgccctacgtaggaaaactgcttctgtgagcacttataaaactcccataagtagagagatttcatagttatggtgacttcccataagacattgcgacatgcaaatatggtggcgcgttcgtccccgtccggtgcaggcagcttcgctccaggacgcacgcgcaatacatgttcccgccttgagactgcgccggcagattcctaggaagtggttgatgacgtcgatgttagggatccatggc

SEQ ID NO: 463 - DNA, 253 bp, Sus scrofa; identical to SEQ ID NO: 462

SEQ ID NO: 464 - DNA, 253 bp, Sus scrofa
tgagcttctctccgccctacgtagaaaaactgcttctgtgagcacttataaaactcccataagtagagagatttcatagttatggtgacttcccataagacattgcgacatgcaaatatggtggcgcgttcgtccccgtccggtgcaggcagcttcgctccaggacgcacgcgcaatacatgttcccgccttgagactgcgccggcagattcctaggaagtggttgatgacgtcgatgttagggatccatggc

SEQ ID NO: 465 - DNA, 253 bp, Sus scrofa
tgagcttctctccgccctacgtaggaaaacagcttctgtgagcacttataaaactcccataagtagagagatttcatagttatggtgacttcccataagacattgcgacatgcaaatattgtggcgcgttggtccccgtccggtgcaggcagcttcgctccaggacgcacgcgcaatacatgttcccgccttgagactgcgccggccgattcctaggaagtggttgatgacgtcgatgttggggctccatggc

SEQ ID NO: 466 - DNA, 253 bp, Sus scrofa; identical to SEQ ID NO: 465

SEQ ID NO: 467 - DNA, 253 bp, Sus scrofa
tgagcttctctccgccctacgtaagaaaactacctctgtgagcacttataaaactcccataagtagagagatttcatagttatggtgacttcccataagacattgcgacatgcaaatattgtggcgcggtcgtccccgtccggtgcaggcagtttcgctccaggacgcacgcgcactacatgttcccgccttgagactgcgccggccgattcctaggaagtggttgatgacgtcgatgttggggctccatggc

SEQ ID NO: 468 - DNA, 253 bp, Catagonus wagneri
tgagcttctctccgccctacggagaaaacctcctggaccgagcatttataaagctcccatacttacagtgatttcatagttatggtgacttcccacaagacattgcgagatgcaaatattgtggagggtacttccccgtcctgtgcgaacagcttccggccaggacgtaggcgcgcagcgtgttcccgccttgagactgtgccggcgattcctaggagggtggttgatgacgtcaatattcgggctccatggc

SEQ ID NO: 469 - DNA, 244 bp, Artificial Sequence
  Description of Artificial Sequence: Synthetic polynucleotide
  modified_base (172)..(172): a, c, t, or g
tgagcttccckccgccctaygsmraamamyrssckcaarsmgcatttataakgmkcycawacctaragmcayttkwcggttayggtgacttcccayaasacattgcgacatgcaaataytdyrgwgcgtycckcccctggyarytccwcgctrggacgcacrcgcrctacgngttcccgcctttwgactgcgcyggcgattccwgggagmggrytgatgacgtcagcgttcgggmtccatggcg

SEQ ID NO: 470 - DNA, 248 bp, Artificial Sequence
  Description of Artificial Sequence: Synthetic polynucleotide
  modified_base (131)..(133): a, c, t, or g
  modified_base (144)..(144): a, c, t, or g
  modified_base (176)..(176): a, c, t, or g
tgagcttccckccgccctaygbmrravrvydssykcardsmrcayttataadghkcycadamstarakmsayttbwcrsttayggtgacttcycryaasacattgsgayatgcaaataytdyrgwgcgtynnncckcscctggnyarytyywcgcyrggacgcacrcgcrctrcgngytcccgcctttwgactgcgcyggcgatwcywgggagmggrytgatgacgtcarygttskggmtccatggcg

SEQ ID NO: 471 - DNA, 252 bp, Artificial Sequence
  Description of Artificial Sequence: Synthetic polynucleotide
  modified_base (27)..(27): a, c, t, or g
  modified_base (52)..(52): a, c, t, or g
  modified_base (131)..(133): a, c, t, or g
  modified_base (144)..(148): a, c, t, or g
  modified_base (180)..(180): a, c, t, or g
tgagcttccckccgcccyayrbvrranrvydvvykcwrdbmrcryttataanrhkcycadamstarakhsayttbwyrsttayggtgacttcycryaasacaktgsgryatgcaaataytdyrghgygyhnnnccbcsycyggnnnnnyarytyydckcyrggacgyrcrcgcrmtrcrngytcccgcctwkwgactgcgcyggcgatwcywrsgagmkgrytgatgacgtcarygttskggmtccatggcg

SEQ ID NO: 472 - DNA, 262 bp, Artificial Sequence
  Description of Artificial Sequence: Synthetic polynucleotide
  modified_base (22)..(23): a, c, t, or g
  modified_base (27)..(27): a, c, t, or g
  modified_base (29)..(29): a, c, t, or g
  modified_base (39)..(39): a, c, t, or g
  modified_base (52)..(52): a, c, t, or g
  modified_base (95)..(95): a, c, t, or g
  modified_base (127)..(132): a, c, t, or g
  modified_base (138)..(140): a, c, t, or g
  modified_base (151)..(156): a, c, t, or g
  modified_base (167)..(167): a, c, t, or g
  modified_base (189)..(189): a, c, t, or g
  modified_base (215)..(215): a, c, t, or g
  modified_base (224)..(224): a, c, t, or g
tgagcttcyckccgcccyayrnnrrrnrnbdvvbbcwvnbmryvyttataanrhkcbcadavbkarrkhvayttbwyrvttayggygayttcycnrhamsrcakwgsrryatgcaaataykdyrghnnnnnngyryhnnnccbsbycyrknnnnnnyadbtyydckncyrggacgyrsrcgcrmtrcrngytcccgccywkwgactgcgcysgcngatwmyhrngarvkgrytgatgacgtcrryrttvkgghtccatggcg

SEQ ID NO: 473 - DNA, 264 bp, Artificial Sequence
  Description of Artificial Sequence: Synthetic polynucleotide
  modified_base (22)..(23): a, c, t, or g
  modified_base (26)..(29): a, c, t, or g
  modified_base (31)..(35): a, c, t, or g
  modified_base (39)..(40): a, c, t, or g
  modified_base (52)..(52): a, c, t, or g
  modified_base (54)..(54): a, c, t, or g
  modified_base (60)..(60): a, c, t, or g
  modified_base (62)..(62): a, c, t, or g
  modified_base (65)..(65): a, c, t, or g
  modified_base (69)..(70): a, c, t, or g
  modified_base (73)..(75): a, c, t, or g
  modified_base (95)..(95): a, c, t, or g
  modified_base (122)..(122): a, c, t, or g
  modified_base (127)..(132): a, c, t, or g
  modified_base (138)..(140): a, c, t, or g
  modified_base (151)..(156): a, c, t, or g
  modified_base (166)..(170): a, c, t, or g
  modified_base (178)..(178): a, c, t, or g
  modified_base (186)..(186): a, c, t, or g
  modified_base (189)..(189): a, c, t, or g
  modified_base (203)..(204): a, c, t, or g
  modified_base (217)..(217): a, c, t, or g
  modified_base (224)..(224): a, c, t, or g
  modified_base (226)..(226): a, c, t, or g
  modified_base (252)..(252): a, c, t, or g
tgagcttcycdccgcccyryvnnvrnnnnbnnnnnbdvnnhryvyttataanrndcbsrnrnbbnvrknnaynnnhhrvttayggygaytycycnrhamsvmabwgsrrbatgyaaataybnyrghnnnnnnrbryhnnnccbsbychddnnnnnnhmdbkyydhnnnnngkacryrnrcryvvbnyrnsytccsgccywkdnngaybghrchvgyngrywmynrngarvkrvytgatgacgymrvyrhkvngrhwccatggcg

SEQ ID NO: 474 - DNA, 272 bp, Artificial Sequence
  Description of Artificial Sequence: Synthetic polynucleotide
  modified_base (21)..(35): a, c, t, or g
  modified_base (37)..(42): a, c, t, or g
  modified_base (44)..(46): a, c, t, or g
  modified_base (49)..(50): a, c, t, or g
  modified_base (57)..(57): a, c, t, or g
  modified_base (59)..(59): a, c, t, or g
  modified_base (65)..(65): a, c, t, or g
  modified_base (67)..(68): a, c, t, or g
  modified_base (70)..(70): a, c, t, or g
  modified_base (74)..(75): a, c, t, or g
  modified_base (78)..(80): a, c, t, or g
  modified_base (84)..(84): a, c, t, or g
  modified_base (100)..(100): a, c, t, or g
  modified_base (114)..(114): a, c, t, or g
  modified_base (125)..(126): a, c, t, or g
  modified_base (128)..(128): a, c, t, or g
  modified_base (131)..(131): a, c, t, or g
  modified_base (133)..(138): a, c, t, or g
  modified_base (144)..(146): a, c, t, or g
  modified_base (149)..(150): a, c, t, or g
  modified_base (154)..(154): a, c, t, or g
  modified_base (157)..(163): a, c, t, or g
  modified_base (170)..(176): a, c, t, or g
  modified_base (184)..(184): a, c, t, or g
  modified_base (190)..(192): a, c, t, or g
  modified_base (195)..(195): a, c, t, or g
  modified_base (209)..(211): a, c, t, or g
  modified_base (218)..(218): a, c, t, or g
  modified_base (220)..(221): a, c, t, or g
  modified_base (224)..(224): a, c, t, or g
  modified_base (231)..(231): a, c, t, or g
  modified_base (233)..(233): a, c, t, or g
  modified_base (238)..(239): a, c, t, or g
  modified_base (259)..(260): a, c, t, or g
tgagctycycdccgccyyrhnnnnnnnnnnnnnnnbnnnnnnvnnnrynntwatawnrndcbsrnvnnbnvrbnnaynnnhhvnytayggygaytycycnrhamsvvabwgsrnrbatgyaaatnnbnhrnhnnnnnnrbrbhnnncsnnbyynddnnnnnnnmdbbybnnnnnnnrdrcvbrnrmryvnnnhrnvhyccsrccyhkdnnngvybbhnsnnsyngrbdmynrngadvnnrvyyrrtgacrymrvydhbnnrrhdcbatggcg

SEQ ID NO: 475 - DNA, 255 bp, Felis catus
tgagcttccctccgccctatgggaaagggtggccccgccgagcatttataagactcccatacctaaagacatttctcagttatggtgatttccctcaaacacacagcaacatgcaaatatcgaggggtgtaccgcccctgtcctttgtagacgtcttctctccaggacgcacgcgcgctgtattcccgccttgtgactctaggcgggcgattcctgggagagggttgatgacgtccaagttctggcttcatggcg

SEQ ID NO: 476 - DNA, 254 bp, Felis nigripes
tgagcttccctccgccctatgggaaagggtggccccgccgagcatttataagactcccatacctaaagacatttctcagttatggtgatttcccacaacacacagcaacatgcaaatatcgaggggtgtaccgcccctgtcctttgtagacgtcttctctccaggacgcacgcgcactgtattcccgccttgtgactctaggcgggcgattcctgggagagggttgatgacgtccaagttctggcttcatggcg

SEQ ID NO: 477 - DNA, 254 bp, Felis catus
tgagcttccctccgccctatgggaaagggtggccccgccgagcatttataagactcccatacctaaagacatttctcagttatggtgatttcccacaacacacagcaacatgcaaatatcgaggggtgtaccgcccctgtcctttgtagacgtcttctctccaggacgcacgcgcgctgtattcccgccttgtgactctaggcgggcgattcctgggagagggttgatgacgtccaagttctggcttcatggcg

SEQ ID NO: 478 - DNA, 254 bp, Felis catus; identical to SEQ ID NO: 477

SEQ ID NO: 479 - DNA, 254 bp, Puma concolor
tgagcttccctccgccctatgggaaagggtggccccgccgagcatttataagactcccatacctaaagacatttctcagttatggtgatttcccacaacacacagcaacatgcaaatatcgaggggtgtaccgcccctgtcctttgtagacgtcttctctccaggacgcacgcgcgctgtattcccgccttgtgactctaggcgggcgattcctgggagagggttgatgacgtccgagttctggcttcatggcg

SEQ ID NO: 480 - DNA, 254 bp, Puma concolor; identical to SEQ ID NO: 479

SEQ ID NO: 481 - DNA, 254 bp, Acinonyx jubatus
tgagcttccctccgccctatgggaaagggtggccccgccgagcatttataagactcccatacctaaagacatttctcagttatggtgatttcccacaacacacagcaacatgcaaataccgaggggtgtaccgcccctgtcctttgtagacgtcttctctccaggacgcacgcgcgctgtattcccgccttgtgactctaggcgggcgattcctgggagagggttgatgacgtccaagttctggcttcatggcg

SEQ ID NO: 482 - DNA, 254 bp, Acinonyx jubatus; identical to SEQ ID NO: 481

SEQ ID NO: 483 - DNA, 254 bp, Lynx pardinus
tgagcttccctccgccctatgggaaagggtggccccgccgagcatttataagactcccatacctaaagacatttctcagttatggtgatttcccacaacacacagcaacatgcaaatatcgaggggtgtaccgcccctgtcctttgtagacgtcttctctccaggacgcacgcgcgctgtattcccgccttgtgactctaggcgggtgattcctgggagagggttgatgacgtccaggttctggcttcatggcg

SEQ ID NO: 484 - DNA, 254 bp, Lynx canadensis
tgagcttccctccgccctatgggaaagggtggccccgccgagcatttataagactcccatacctaaagacatttctcagttatggtgatttcccacaacacacagcaacatgcaaatatcgaggggtgtaccgcccctgtcctttgtagacgtcttctctccaggacgcacgcgcgctgtattcccgccttgtgactctaggcgggcgattcctgggagagggttgatgacgtccaggttctggcttcatggcg

SEQ ID NO: 485 - DNA, 254 bp, Puma yagouaroundi
tgagcttccctccgccctatgggaaagggtggccccgcagagcatttataagactcccatacctaaagacatttcacagttatggtgatttcccacaacacacagcaacatgcaaatatcgaggggtgtaccgcccctgtcctttgtagacgtcttctctccaggacgcacgcgcgctgtattcccgccttgtgactctaggcgggcgattcctgggagagggttgatgacgtccaagttctggcttcatggcg

SEQ ID NO: 486 - DNA, 252 bp, Panthera onca
tgagcttccctccgccctatgggaaagggtggctccgccgagcatttataagactcccatacctaaagacatttctcagttatggtgacttcccacaacgcacagcaacatgcaaatatcgaggggtgtaccgcccctgtcctttgtagacgtcttctctccaggacgcacgcgcgctgtattcccgccttgtgactaagcgggcgattcctgggagagggttgatgacgcccaagttctggcttcatggcg

SEQ ID NO: 487 - DNA, 252 bp, Panthera pardus
tgagcttccctccgccctatgggaaagggtggccccgccgagcatttataagactcccatacctaaagacatttctcagttatggtgacttcccacaacgcacagcaacatgcaaatatcgaggggtgtaccgcccctgtcctttgtagacgtcttctctccaggacgcacgcgcgctgtattcccgccttgtgactaggcgggcgattcctgggagagggttgatgacgcccaagttctggcttcatggcg

SEQ ID NO: 488 - DNA, 252 bp, Panthera leo
tgagcttccctccgccctatgggaaagtgtggctccgccgagcatttataagactcccatacctaaagacatttctcagttatggtgacttcccacaacgcacagcaacatgcaaatatcgaggggtgtaccgcccctgtcctttgtagacgtcttctctccaggacgcacgcgcgctgtattcccgccttgtgactaggcgggcgattcctgggagagggttgatgacgcccaagttctggcttcatggcg

SEQ ID NO: 489 - DNA, 252 bp, Panthera leo
tgagcttccctccgccctatgggaaagggtggccccaccgagcatttataagactcccatacctaaagacatttctcagttatggtgacttcccacaacgcacagcaacatgcaaatatcgaggggtgtaccgcccctgtcctttgtagacgtcttctctccaggacgcacgcgcgctgtattcccgccttgtgactagccgggcgattcctgggagagggttgatgacgcccaagttctggcttcatggcg

SEQ ID NO: 490 - DNA, 252 bp, Panthera tigris
tgagcttccctccgccctatgggaaagggtggtcccgccgagcatttataagactcccatacctaaagacatttctcagttatggtgacttcccacaacacacagcaacatgcaaatatcgaggggtgtaccgcccctgtcctttgtagacgtcttctctccaggacgcacgcgcgctgtattcccgccttgtgactaggcgggcgattcctgggagagggttgatgacgtccaagttctggcttcatggcg

SEQ ID NO: 491 - DNA, 254 bp, Paradoxurus hermaphroditus
tgagcttccctccgccctatgggaaagaggggctctgctcagcgtttataaggctcccatacctaaagacatttcacagttatggtgacttcccacaagacacagcaacatgcaaatacagaggggtgtaccgccccagtcctttgtagacgccttctcgccaggacgcacgcgcgctatgttcccgccttgtgactctaggcgggcgattcttgggagagggttgatgacgtccaagttctgactccatggcg

SEQ ID NO: 492 - DNA, 254 bp, Hyaena hyaena
tgagcttccctccgccctatgggagagggaggtaccgctgagcgtttataaggctcccatatctaaaggcatttcacagttatggtgacttcccacaacacacagcaacatgcaaatatagagaagcgtaccacccctgtcctttgcaaatgtcttctagccaggacgcacgcgcactgtgttcccgccttgtgactcgaggcgggcgatacctgggagagggttgatgacgtccaagttctgattccatggcg

SEQ ID NO: 493 - DNA, 254 bp, Hyaena hyaena; identical to SEQ ID NO: 492

SEQ ID NO: 494 - DNA, 254 bp, Crocuta crocuta
tgagcttccctccgccctatgggagagggaggttccgctgaacgtttataaggctcccatatctaaagacatttcacagttatggtgacttcccacaacacacagcaacatgcaaatacagagaagcgtaccacccctgtcctttgcagacgtcttctagccaggacgcacgcgcactgtgttcccgccttgtgactcgaggcgggcgatacctgggagagggttgatgacgtccaagttctgactccatggcg

SEQ ID NO: 495 - DNA, 254 bp, Mungos mungo
tgagcttccctccgccctacaggcaaaagaagttcggccgagaatttataaggctccaatacctaaagacatttctcagttacggtgacttcccacaacacacagcaacatgcaaatatcgagaggtgtaccgcccctgtcctttgtagacgtcctctcctcgggacgcacgcgcgctgtgttcccgccttatgactctaggcgggcgattcctgggagagggttgatgacgtccaagttctgactccatggcg

SEQ ID NO: 496 - DNA, 254 bp, Helogale parvula
tgagcttccctccgccctacaggcaaaagcaatccggccgagaatttataaggctccaatacctaaagacatttctcagttacggtgacttcccacaacacacagcaacatgcaaatatcgagaggtgtaccgcccctgtcctttgtagacgtcttctcttcgagacgcacgcgcgctgtgttcccgccttatgactctaggcgggcgattcctgggagagggttgatgacgtccaagttctgactccatggcg

SEQ ID NO: 497 - DNA, 254 bp, Suricata suricatta
tgagcttccctccgccctacaggcaaaagccattcggccgagaatttataaggctccaatacctaaagacatttctcagttacggtgacttcccacaacacacagcaacatgcaaatatcgagaggtgtaccgcccctgtcctttgtagacgtcttctcttcgggacgcacgcgcgctgtgttcccgccttatgactctaggcgggcgattcctgggagagggttgatgacgtccaacttctgactccatggcg

SEQ ID NO: 498 - DNA, 254 bp, Suricata suricatta; identical to SEQ ID NO: 497

SEQ ID NO: 499 - DNA, 254 bp, Cryptoprocta ferox
tgagcttccctccgccctatgaaaaaagacgtctgcacagagcatttataaggctctcacacctaaagacatttctcagttatggtgacttcccacaacacacagcaacatgcaaatatcgagaggtgtaccgcctctgtccttcgtagacgtcttctcgtcaggacgcacgcgcgctgtgttcccgccttatgactccaggcgggcgattcctgggagagggttgatgacgtccaagttctgactccatggcg

SEQ ID NO: 500 - DNA, 252 bp, Ailurus fulgens
tgagcttccctccgccctatgggaaaggctggccccacagagcacttataaggctccataactaaagacatttctcggttgtggtgacttcccacaacgcatagcaacatgcaaatatcgcggggagtacctccccgtcccttgtacgcggcttctcaggacgcacgcacgcgcgctgtgttcccgccctgtgactccaggcgggcaattcccggcagagggttggtgacgggaacgttcaggctccatggc

SEQ ID NO: 501 - DNA, 253 bp, Ursus americanus
tgagcttccctccgccctacgggaaagggttgtcctgaggcggatttataaggctcccacatctaaaggcatttcacagtcatggtgacttcccacaatacatagcaacatgcaaatttcgcggggagtacctcccctgtcccttgtacgcggcttctcaggacgcacgcacgcgctctgtgttcccgccctgtgactctaggagggcaattcctgggacagtgttctgacgggaacgttcaggctccatggc

SEQ ID NO: 502 - DNA, 253 bp, Ursus thibetanus
tgagcttccctccgccctatgggaaaaggtggtcctgaggcggatttataaggctcccatatctaaaggcatttcacagtcatggtgacttcccacaatacatagcaacatgcaaatttcgcggggagtacctcccctgtcccttgtacgcggcttctcaggacgcacgcacgcgctctgtgttcccgccctgtgactctaggagggcaattcctgggacagtgttctgacgggaacgttcaggctccatggc

SEQ ID NO: 503 - DNA, 253 bp, Ursus thibetanus
tgagcttccctccgccctacgggaaagggtggtcctgaagcggatttataaggctcccatatctaaaggcatttcacagtcatggtgacttcccacaatacatagcaacatgcaaatttcgcggggagtacctcccctgtcccttgtacgcggcttctcaggacgcacgcacgcgctctgtgttcccgccctgtgactctaggagggcaattcctgggacagtgttctgacgggaacgttcaggctccatggc

SEQ ID NO: 504 - DNA, 253 bp, Ursus maritimus
tgagcttccctccgccctatggaaaagggtggtcctgaggcggatttataaggctcccacatctaaaggcatttcacagtcatggtgacttcccacaatacatagcaacatgcaaatttcgcggggagtacctcccctgtcccttgtacgaggcttctcaggacgcacgcacgcgctctgtgttcccgccctgtgactctaggagggcaattcctgggacagtgttctgacgggaacgttcaggctccatggc

SEQ ID NO: 505 - DNA, 253 bp, Ursus arctos
tgagcttccctccgccctatgggaaagggtggtcctgaggcggatttataaggctcccacatctaaaggcatttcacagtcatggtgacttcccacaatacatagcaacatgcaaatttcgcggggagtacctcccctgtcccttgtacgaggcttctcaggacgcacgcacgcgctctgtgttcccgccctgtgactctaggagggcaattcctgggacagtgttctgacgggaacgttcaggctccatggc

SEQ ID NO: 506 - DNA, 253 bp, Ailuropoda melanoleuca
tgagcttccctccgccctatagggaaagccgcgcctggggcggatttataaggcttccatatctaaaggcatttcacagtcatggtgacttcccacaatacatagcaacatgcaaatatcgcggggagaacctcccctgtcccttgtacgcggcttctaaagacgcacgcacgcgctctgtgttcccgccctgtgactctaggcgggcaattcctgggacagtgttctgacgggaacgttcaggctccatggc

SEQ ID NO: 507 - DNA, 253 bp, Ailuropoda melanoleuca; identical to SEQ ID NO: 506

SEQ ID NO: 508 - DNA, 253 bp, Taxidea taxus
tgagcttccctccgccctacgagaaagggcggccccagacaacatttataaggctcccgcacctaaaggcattttacagttatggtgacttcccacaacgcgtagcaacatgcaaatatctcggggagtatcgcccctgtcgcttgtacgcgtcttctcaggacgcacgcacgcgcgctgtgttcccgccttgtgactcaaagcgggctattcccgggcgggtttgctgacgggaacgttcaggttccatggc

SEQ ID NO: 509 - DNA, 254 bp, Mirounga angustirostris
tgagcttccctccgccctatggaaaagagtggccccagagagcacttataaggctcccgcacctaaatgcatttatcagttatggtgacttcccacaatacatagcaacatgcaaatatagcggggagtacctcccctgtcccttgtccgtgtcttctcaggacgcacgcacgcgcgctgtgttcccgccctgtgactctaagcgggcaattcctggaagaggcttgctgacgggaacgttcaggctccatggc

SEQ ID NO: 510 - DNA, 254 bp, Mirounga leonina
tgagcttccctccgccctatggaaaagagtggccccagagagcatttataaggctccctcacctaaatgcatttatcagttatggtgacttcccacaatacatagcaacatgcaaatatagcggggagtacctcccctgtcccttgtccgtgtcttctcaggacgcacgcacgcgcgctgtgttcccgccctgtgactctaagcgggcaattcctggaagaggcttgctgacgggaacgttcaggctccatggc

SEQ ID NO: 511 - DNA, 254 bp, Leptonychotes weddellii
tgagcttccctccgccctatggggaagagtggccccagagagcatttataaggctcccgcacctaaatgcatttatcagttatggtgacttcccacaatacatagcaacatgcaaatatagcggggagtacctcccctgtcccttgtacgtgtcttctcaggacgcacgcacgcgggctgtgttcccgccctgtgactctaagcgggcaattcctggaagaggcttgctgacggggacgttcaggctccatggc

SEQ ID NO: 512 - DNA, 254 bp, Neomonachus schauinslandi
tgagcttccctccgccctatggggaagggtggccccagagcgcatttataaggctcccgcacctaaatgcatttatcagttatggtgatttcccacaatacatagcaacatgcaaatatcgcggggagtacctcccctgtcccttgtacgtgtcttctcaggatgcacgcacgcgcgctgtgttcccgccctgtgactctaagcgggcaattcctggaagaggcttgctgacgggaacgttcaggctccatggc

SEQ ID NO: 513 - DNA, 254 bp, Phoca vitulina
tgagcttccctccgccctatgggaaagggtggccccagagagaatttataaggctcccgcacctaaatgcatttatcagttatggtgacttcccacaatacatagcaacatgtaaatatcgcggggagtacctcccctgtcccttgtacgtgtcttctcaggacgcacgcacgcgcgctgtgttcccgccctgtgactctaggcgggcaattcctggaagaggcttgctgacgggaacgttcaggctccatggc

SEQ ID NO: 514 - DNA, 254 bp, Halichoerus grypus
tgagcttccctccgccctatgggaaagggtggccccggagagtatttataaggctcccgcatctaaatgcatttatcagttatggtgacttcccacaatacatagcaacatgtaaatatcgcggggagtacctcccctgtcccttgtacgtgtcttctcaggacgcacgcacgcgcgctgtgttcccgccctgtgactctaggcgggcaattcctggaagaggcttgctgacgggaacgttcaggctccatggc

SEQ ID NO: 515 - DNA, 254 bp, Zalophus californianus
tgagcttccctccgccctatgggaaacggtggccccaaagagcacttataaagccccctcaactaaatgcatttatcagttatggtgacttcccacaatacatagcaacatgcaaatatcgcggggagtacctcccctgtcccttgtacgtgtcatctcaggacgcacgcacgcgcgctgtgttcccgccctgtgactccaggtggacagttcttgggggaggcttgctgacgggaacgttccggctccatggc

SEQ ID NO: 516 - DNA, 254 bp, Zalophus californianus; identical to SEQ ID NO: 515

SEQ ID NO: 517 - DNA, 254 bp, Arctocephalus gazella; identical to SEQ ID NO: 515

SEQ ID NO: 518 - DNA, 254 bp, Arctocephalus gazella; identical to SEQ ID NO: 515

SEQ ID NO: 519 - DNA, 254 bp, Eumetopias jubatus; identical to SEQ ID NO: 515

SEQ ID NO: 520 - DNA, 254 bp, Zalophus californianus; identical to SEQ ID NO: 515

SEQ ID NO: 521 - DNA, 254 bp, Callorhinus ursinus
tgagcttccctccgccctatgggaaacggtggccccaaaaagcacttataaagccccctcacctaaatgcattaatcagttatggtgacttcccacaatacatagcaacatgcaaatatcgcggggagtacctcccctgtcccttgtacgtgtcttctcaggacgcacgcacgcgcgctgtgttcccgccctgtgactctaggtggacaattcctgggggaggcttgctgacgggaacgttccggctccatggc

SEQ ID NO: 522 - DNA, 254 bp, Odobenus rosmarus
tgagcttccctccgccctatgggaaacggtggccccaaagagcatttataaagctccctcaactaaatgcatttatcagttatggtgacttcccacaatacatcgcaacatgcaaacatcgcggggagtacctcccctgtcccttgtacgtgtcttctcaggacgcacgcacgcgcgctgtgttcccgccctgtgactctaggcgggcaattcctagaagacgcttgctgacgggaacgttccggctccatggc

SEQ ID NO: 523 - DNA, 254 bp, Pteronura brasiliensis
tgagcttccctccgccctatgggagaaggtggccccagcaagcatttataaggctcccgcatctaaagacattttacagttatggtgacttcccacaacgcatagcaatatgcaaatatagcagggagtaccgcccctgtcccttgtacgcgtcttctcaggacgcacgcacgcgcgctgtgttcccgccctgtgactccaggcgggtatttcctggggcgggtttgctgacaagaacgttcaggctccatggc

SEQ ID NO: 524 - DNA, 254 bp, Neogale vison
tgagcttccctccgccctatgggaaagggtggccccagcgagcatttataaggctcccgcatctaaagacattttacagttatggtgacttcccacaacgcgtagcaacatgcaaatatcgcggggagtaccgcccctgtcccttgcacgcgtcttctcagcacgcacgcacgcgcgctgtgttcccgccctgtgactccaggcgggtattgcccggggcgggtttgccgacaggaacgttcaggctccatggc

SEQ ID NO: 525 - DNA, 254 bp, Lontra canadensis
tgagcttccctccgccctatgggaaagggtggccccagcgagcatttataaggctcccgcatctaaagacattttacagttatggtgacttcccacaacgcgtagcaacatgcaaatatcgcagggagtaccgcccctgtcccttgtacgcgtcttctcagcacgcacgcacgcgcgctgtgttcccgccctgtgactccaggcgggtatttcccggggcgggtttgctgacaagaacgttcaggcgccatggc

SEQ ID NO: 526 - DNA, 254 bp, Lutra lutra
tgagcttccctccgccctatgggaaagggtgggcccagcgagcatttataaggctcctgcatctaaagacattttacaattatggtgacttcccacaacgcgtagcaacatgcaaatatcgcagggagtaccgcccctgtcccttgtacgcgtcttctcagcacgcacgcacgcgcgctgtgttcccgccctgtgactccaggcgggtatttcccggggcgggtttgctgacaagaactttcaggctccatggc

SEQ ID NO: 527 - DNA, 254 bp, Lutra lutra; identical to SEQ ID NO: 526

SEQ ID NO: 528 - DNA, 253 bp, Enhydra lutris
tgagcttccctccgccctatgggaaagggtggacctagcgagcatttataaggctcccgcatctaaagacattttacaattatggtgacttcccacaacgcgtagcaacatgcaaatatcgcaggagtaccgcccctgtcccttgtacgcgtcttctcagcacgcacgcacgcgcgctgtgttcccgccctgtgactccaggcgggtatttcccggggcgggtttgctgccaagaacgttcaggctccatggc

SEQ ID NO: 529 - DNA, 253 bp, Enhydra lutris; identical to SEQ ID NO: 528

SEQ ID NO: 530 - DNA, 254 bp, Martes zibellina
tgagcttccctccgccctatgggaaagggtggccccagagagcatttataaggctcccgcgcctaaaggcatttaacagttatggtgacttcccacaacgcgtagcaacatgcaaatatcgcagggagtaccgcccctgtcccttgtacgcatcttttcaggacgcacgcacgcgcgctgtgttcccgccctgtgactccaggcgggcatttcccggggcgggtttgctgacaggaacgtccaggctccatggc

SEQ ID NO: 531 - DNA, 254 bp, Gulo gulo
tgagcttccctccgccctatgggaaagggtggacccagagcgcatttataaggctcccgcacctaaacgcatttaacagttatggtgacttcccacaacgcgtagcaacatgcaaatatcgcagggagtaccgcccctgtcccttgtacgcatcttctcaggacgcacgcacgcgcgctgtgttcccgccctgtgactccaggcgggcatttcccggggcgggtttgctgacaggaacgttcaggctccatggc

SEQ ID NO: 532 - DNA, 254 bp, Mustela erminea
tgagcttccctccgccctatgggaaacggtggccccaccgagcatttataaggctcccgcatctaaagacattttacaattatggtgacttcccacaacgcgtagcaacatgcaaatatcgcggagagtaccgcccctgtcccaagcacgcgtcttctcagcacgcacgcacgcgcgctatgttcccgccctgtgactccaggcgggtatttccaggggcgggtttgctgacaggagcgttcaggcttcatggc

SEQ ID NO: 533 - DNA, 254 bp, Mustela erminea; identical to SEQ ID NO: 532

SEQ ID NO: 534 - DNA, 255 bp, Mustela putorius
tgagcttccctccgccctatggggaaagggtggacccaccgagcatttataaggctcccgcatctaaagacattttacagttatggtgacttcccacaacgcgtagcaacatgcaaatatcgtggagagtaccgcccctgtcccatgcacgcgtcttctcagcacgcacgcacgcgcgctgtgttcccgccctgtgactccaggcgggtatttccaggggcgggtttgctgacaggaacgttcaggcttcatggc

SEQ ID NO: 535 - DNA, 254 bp, Mustela putorius
tgagcttccctccgccctatgggaaagggtggacccaccgagcatttataaggctcccgcatctaaagacattttacagttatggtgacttcccacaacgcgtagcaacatgcaaatatcgtggagagtaccgcccctgtcccatgcacgcgtcttctcagcacgcacgcacgcgcgctgtgttcccgccctgtgactccaggcgggtatttccaggggcgggtttgctgacaggaacgttcaggcttcatggc

SEQ ID NO: 536 - DNA, 254 bp, Mustela putorius; identical to SEQ ID NO: 535

SEQ ID NO: 537 - DNA, 254 bp, Mustela putorius; identical to SEQ ID NO: 535

SEQ ID NO: 538 - DNA, 254 bp, Mustela putorius; identical to SEQ ID NO: 535

SEQ ID NO: 539 - DNA, 254 bp, Mustela putorius; identical to SEQ ID NO: 535

SEQ ID NO: 540 - DNA, 254 bp, Mustela putorius; identical to SEQ ID NO: 535

SEQ ID NO: 541 - DNA, 254 bp, Mustela putorius; identical to SEQ ID NO: 535

SEQ ID NO: 542 - DNA, 254 bp, Mustela putorius; identical to SEQ ID NO: 535

SEQ ID NO: 543 - DNA, 254 bp, Mustela putorius; identical to SEQ ID NO: 535

SEQ ID NO: 544 - DNA, 254 bp, Mustela putorius; identical to SEQ ID NO: 535

SEQ ID NO: 545 - DNA, 254 bp, Mustela putorius; identical to SEQ ID NO: 535

SEQ ID NO: 546 - DNA, 254 bp, Mustela putorius; identical to SEQ ID NO: 535

SEQ ID NO: 547 - DNA, 254 bp, Mustela putorius; identical to SEQ ID NO: 535

SEQ ID NO: 548 - DNA, 254 bp, Mustela putorius; identical to SEQ ID NO: 535

SEQ ID NO: 549 - DNA, 255 bp, Mustela putorius
tgagcttccctccgccctatgggaaagggtggacccaccgagcatttataaggctcccgcatctaaagacattttacagttatggtgacttcccacaacgcgtagcaacatgcaaatatcgtggagagtaccgcccctgtcccatgcacgcgtcttctcagcacgcacgcacgcgcgctgtgttccccgccctgtgactccaggcgggtatttccaggggcgggtttgctgacaggaacgttcaggcttcatggc

SEQ ID NO: 550 - DNA, 255 bp, Mustela putorius
tgagcttccctccgccctatgggaaagggtggacccaccgagcatttataaggctcccgcatctaaagacattttacagttatggtgacttcccacaacgcgtagcaacatgcaaatatcgtggagagtaccgcccctgtcccatgcacgcgtctttctcagcacgcacgcacgcgcgctgtgttcccgccctgtgactccaggcgggtatttccaggggcgggtttgctgacaggaacgttcaggcttcatggc

SEQ ID NO: 551 - DNA, 252 bp, Mustela putorius
tgagcttccctccgccctatgggaaagggtggacccaccgagcatttataaggctcccgcatctaaagacattttacagttatggtgacttcccacaacgcgtagcaacatgcaaatatcgtggagagtaccgcccctgtcccatgcacgcgtcttctcagcacgcacgcacgcgctgtgttcccgccctgtgactccaggcgggtatttccaggggcgggtttgctgacaggaacgttcaggcttcatggc

SEQ ID NO: 552 - DNA, 252 bp, Mustela putorius; identical to SEQ ID NO: 551

SEQ ID NO: 553 - DNA, 253 bp, Mustela putorius
tgagcttccctccgccctatgggaaagggtggacccaccgagcatttataaggctccgcatctaaagacattttacagttatggtgacttcccacaacgcgtagcaacatgcaaatatcgtggagagtaccgcccctgtcccatgcacgcgtcttctcagcacgcacgcacgcgcgctgtgttcccgccctgtgactccaggcgggtatttccaggggcgggtttgctgacaggaacgttcaggcttcatggc

SEQ ID NO: 554 - DNA, 253 bp, Mustela putorius; identical to SEQ ID NO: 553

SEQ ID NO: 555 - DNA, 254 bp, Mustela putorius
tgagcttccctccgccctatgggaaagggtggacccaccgagcatttataaggctcccgcatctaaagacattttacagttatggtgacttcccacaacgcgtagcaacatgcaaatatcgtggagagtaccgcccctgtcccatgcacgcgtcttctcagcacgcacgcacgcacgtgtgttccccgccctgtgactccaggcgggtatttccaggggcgggtttgctgacaggaacgttcaggcttcatggc

SEQ ID NO: 556 - DNA, 250 bp, Mustela putorius
tgagcttccctccgccctatgggaaagggtggacccaccgagcatttataaggctccgcatctaaagacattttacagttatggtgacttcccacaacgcgtagcaacatgcaaatatcgtggagagtaccgcccctgtcccatgcacgcgtcttctcagcacgcacgcacgcgctgtgttcccgccctgtgactccaggcgggtatttccagggcgggtttgctgacaggaacgttcaggcttcatggc

SEQ ID NO: 557 - DNA, 254 bp, Mellivora capensis
tgagcttccctccgccctatgggaaagggtggcgccagagaccacttataaggctcccccacctgaaggcattttacagttatggtgacttcccacaatgcgtagcaacatgcaaatatcgcagggagtaccgcccctgtctcttgtaagcgtcgtctcagggcgcacgcacgcgcgctgtgttcccgccctgtgactccaggcgggcatttcccggggcggttttgctgacaggaacgttcaggctccatggc

SEQ ID NO: 558 - DNA, 254 bp, Potos flavus
tgagcttccctccgcccgatgaaagagggtggttccacagagcatttataaggctcccatacctaaagacatttgtcagttatggtgacttcccacaaagcatagcaacatgcaaatatcgcggggagcaccgcccctgtcccttatccgcgtcttcttaggacgcacgcacgcgcgctgtgttcccgccctgtgactccaggcgggcaattctcgggagggggttgctgacggcaacgttcaggctccatggc

SEQ ID NO: 559 - DNA, 259 bp, Artificial Sequence
  Description of Artificial Sequence: Synthetic polynucleotide
tgagcttccctccgccctatggggaaagggtggmcccrsmgagcatttataaggctcccryayctaaagrcatttywcagttatggtgacttcccacaaayrcryagcaacatgcaaatatcghggrgwgtacckcccctgtccywtgyasrcgtctttctcwssasgcacgcacgcgcgctgtgttccccgccytgtgactcyaggcgggyrwttccwgggrsrggkttgmtgacrksmamgttcwggctycatggcg

SEQ ID NO: 560 - DNA, 259 bp, Artificial Sequence
  Description of Artificial Sequence: Synthetic polynucleotide
tgagcttccctccgccctatggggaaavggygghycyrvmgagsatttataagrctcccryayctaaakrcattthwcagttatggtgacttcccacaaayrcryagcaacatgcaaatatcghggrgwgtacckcccctgtccywtgyasrygtctttctcwssasgcacgcacgcgcgctgtrttccccgccytgtgactcyaggcgggyrwttcchgggrsrggbttgmtgacrksmamgttcwggctycatggcg

SEQ ID NO: 561 - DNA, 259 bp, Artificial Sequence
  Description of Artificial Sequence: Synthetic polynucleotide
tgagcttccctccgccctayggggaaavrgygghycyrvvgmgsayttataagrctcccdyayctaaakrcattthwcagttatggtgayttcccacaaayrcryagcaacatgcaaatatmghrgrgwgtacckcccctgtccywtgyasrygkctttctcwssasgcacgcacgcgckctgtrttccccgccytgtgactcyaggygggyrwttcyhgggrsrggbttgmtgacrdsmamgttcwgrctycatggcg

SEQ ID NO: 562 - DNA, 259 bp, Artificial Sequence
  Description of Artificial Sequence: Synthetic polynucleotide
  modified_base (34)..(34): a, c, t, or g
tgagcttccctccgccctaygrrrvravrghvrnycyrvvgmgvayttataarrcyccmdyahctaaakrcattthwcartyayggtgayttcccacaaayrcryagcaacatgcaaatwtmghrrrgwgtacckcccctgtccywtgyasrygkctwtctmdbsrsgcacgcacgcgckctgtrttccccgccytrtgactcyarghggryrdttcyhggrrsrgkbttgmtgacrdsmamgttchgrctycatggcg

SEQ ID NO: 563 - DNA, 259 bp, Artificial Sequence
  Description of Artificial Sequence: Synthetic polynucleotide
  modified_base (31)..(35): a, c, t, or g
  modified_base (40)..(40): a, c, t, or g
  modified_base (44)..(44): a, c, t, or g
  modified_base (60)..(60): a, c, t, or g
  modified_base (76)..(76): a, c, t, or g
  modified_base (101)..(101): a, c, t, or g
  modified_base (158)..(158): a, c, t, or g
  modified_base (163)..(164): a, c, t, or g
  modified_base (167)..(167): a, c, t, or g
  modified_base (204)..(204): a, c, t, or g
  modified_base (238)..(238): a, c, t, or g
tgagcttccctccgccckaygrvrvravdvnnnnnbbrvnvmvnryttataarrcyyyhnyrhstrawbvcattwnwcrrtyryggtgayttcccdcaaanrcrymgcaayatgyaaaywymkhrrrghghryydccycdrtcbywhvymvrhrbctntythnnsrngcacgcacgcrsdctryrttccccgccytrtgactcnrrshrgryddtdcyhrgvrsrvkbttgvygmcrnsvrvbtychgrykycatggcg

SEQ ID NO: 564 - DNA, 259 bp, Artificial Sequence; identical to SEQ ID NO: 563
  Description of Artificial Sequence: Synthetic polynucleotide
  modified_base (31)..(35): a, c, t, or g
  modified_base (40)..(40): a, c, t, or g
  modified_base (44)..(44): a, c, t, or g
  modified_base (60)..(60): a, c, t, or g
  modified_base (76)..(76): a, c, t, or g
  modified_base (101)..(101): a, c, t, or g
  modified_base (158)..(158): a, c, t, or g
  modified_base (163)..(164): a, c, t, or g
  modified_base (167)..(167): a, c, t, or g
  modified_base (204)..(204): a, c, t, or g
  modified_base (238)..(238): a, c, t, or g

SEQ ID NO: 565 - DNA, 243 bp, Balaenoptera bonaerensis; identical to SEQ ID NO: 390

SEQ ID NO: 566 - DNA, 243 bp, Eschrichtius robustus; identical to SEQ ID NO: 391

SEQ ID NO: 567 - DNA, 243 bp, Eschrichtius robustus; identical to SEQ ID NO: 391

SEQ ID NO: 568 - DNA, 243 bp, Eschrichtius robustus; identical to SEQ ID NO: 393

SEQ ID NO: 569 - DNA, 243 bp, Megaptera novaeangliae; identical to SEQ ID NO: 394

SEQ ID NO: 570 - DNA, 243 bp, Balaenoptera musculus; identical to SEQ ID NO: 395

SEQ ID NO: 571 - DNA, 243 bp, Balaenoptera musculus; identical to SEQ ID NO: 396

SEQ ID NO: 572 - DNA, 240 bp, Balaenoptera physalus; identical to SEQ ID NO: 397

SEQ ID NO: 573 - DNA, 241 bp, Eubalaena japonica; identical to SEQ ID NO: 398

SEQ ID NO: 574 - DNA, 245 bp, Balaenoptera acutorostrata; identical to SEQ ID NO: 399

SEQ ID NO: 575 - DNA, 243 bp, Platanista minor; identical to SEQ ID NO: 400

SEQ ID NO: 576 - DNA, 243 bp, Phocoena phocoena; identical to SEQ ID NO: 401

SEQ ID NO: 577 - DNA, 243 bp, Neophocaena asiaeorientalis; identical to SEQ ID NO: 402

SEQ ID NO: 578 - DNA, 243 bp, Phocoena sinus; identical to SEQ ID NO: 403

SEQ ID NO: 579 - DNA, 243 bp, Monodon monoceros; identical to SEQ ID NO: 404

SEQ ID NO: 580 - DNA, 243 bp, Monodon monoceros; identical to SEQ ID NO: 405

SEQ ID NO: 581 - DNA, 243 bp, Monodon monoceros; identical to SEQ ID NO: 405

SEQ ID NO: 582 - DNA, 243 bp, Monodon monoceros; identical to SEQ ID NO: 405

SEQ ID NO: 583 - DNA, 243 bp, Delphinapterus leucas; identical to SEQ ID NO: 408

SEQ ID NO: 584 - DNA, 243 bp, Delphinapterus leucas; identical to SEQ ID NO: 408

SEQ ID NO: 585 - DNA, 243 bp, Delphinapterus leucas; identical to SEQ ID NO: 408

SEQ ID NO: 586 - DNA, 243 bp, Tursiops aduncus; identical to SEQ ID NO: 411

SEQ ID NO: 587 - DNA, 243 bp, Tursiops aduncus; identical to SEQ ID NO: 411

SEQ ID NO: 588 - DNA, 243 bp, Tursiops truncatus; identical to SEQ ID NO: 411

SEQ ID NO: 589 - DNA, 243 bp, Tursiops truncatus; identical to SEQ ID NO: 414

SEQ ID NO: 590 - DNA, 243 bp, Tursiops truncatus; identical to SEQ ID NO: 414

SEQ ID NO: 591 - DNA, 243 bp, Tursiops truncatus; identical to SEQ ID NO: 414

SEQ ID NO: 592 - DNA, 243 bp, Tursiops truncatus; identical to SEQ ID NO: 414

SEQ ID NO: 593 - DNA, 243 bp, Tursiops truncatus; identical to SEQ ID NO: 414

SEQ ID NO: 594 - DNA, 243 bp, Sousa chinensis; identical to SEQ ID NO: 420

SEQ ID NO: 595 - DNA, 243 bp, Sousa chinensis; identical to SEQ ID NO: 420

SEQ ID NO: 596 - DNA, 243 bp, Lagenorhynchus obliquidens; identical to SEQ ID NO: 422

SEQ ID NO: 597 - DNA, 243 bp, Globicephala melas; identical to SEQ ID NO: 423

SEQ ID NO: 598 - DNA, 243 bp, Orcinus orca; identical to SEQ ID NO: 424

SEQ ID NO: 599 - DNA, 243 bp, Lipotes vexillifer; identical to SEQ ID NO: 425

SEQ ID NO: 600 - DNA, 243 bp, Inia geoffrensis; identical to SEQ ID NO: 426

SEQ ID NO: 601 - DNA, 242 bp, Pontoporia blainvillei; identical to SEQ ID NO: 427

SEQ ID NO: 602 - DNA, 242 bp, Pontoporia blainvillei; identical to SEQ ID NO: 427

SEQ ID NO: 603 - DNA, 243 bp, Kogia breviceps; identical to SEQ ID NO: 429

SEQ ID NO: 604 - DNA, 242 bp, Physeter catodon; identical to SEQ ID NO: 430

SEQ ID NO: 605 - DNA, 242 bp, Physeter catodon; identical to SEQ ID NO: 430

SEQ ID NO: 606 - DNA, 242 bp, Physeter catodon; identical to SEQ ID NO: 430

SEQ ID NO: 607 - DNA, 242 bp, Mesoplodon bidens; identical to SEQ ID NO: 433

SEQ ID NO: 608 - DNA, 242 bp, Ziphius cavirostris; identical to SEQ ID NO: 434

SEQ ID NO: 609 - DNA, 243 bp, Artificial Sequence
  Description of Artificial Sequence: Synthetic polynucleotide
tgagcttccckccgccctaygccgaaaryywrgctcaasccrcatttataaggctcccaaayctaarkacatttgtcggttatggtgacttcccgcaacacattgcgacatgcaaatactgcggagcgtwcctcccctggcaactcctcgctgggacgcacgcgcgctacgtgctcccgccttttgactgcgccggcgatacttgggagagggttgatgacgtcagcgttctggctccatggc

SEQ ID NO: 610 - DNA, 243 bp, Artificial Sequence
  Description of Artificial Sequence: Synthetic polynucleotide
  modified_base (29)..(29): a, c, t, or g
tgagcttccckccgccctayrcygaaarnywrsytcaassyrcatttataargctcscaaayckaarkacatttgtcggttatggtgacttcccgcamcacattgcgacatgcaaatactgcggagygyhcctcccctggcaactcctcgctgggacgcacgcgcrctrcgtgctcccgccttttgactgcgccggcgatacttgggagagggttgatgacgtcagcgttctggctccatggc

SEQ ID NO: 611 - DNA, 243 bp, Artificial Sequence
  Description of Artificial Sequence: Synthetic polynucleotide
  modified_base (29)..(29): a, c, t, or g
tgagcttcccdccgccctayrmyraaarnydrsykcaavsyrcatttataargctcscaarbckaarkacatttgtmggttatggtgacttcccgcamcacattgcgacatgcaaatactgcggagygyhcctcccctggcaactcctcgctgggacgcacgcgcrctrcgtgctcccgccttttgactgcgccggcgatacttgggagagggttgatgacgtcagcgttctggctccatggc

SEQ ID NO: 612 - DNA, 243 bp, Artificial Sequence
  Description of Artificial Sequence: Synthetic polynucleotide
  modified_base (29)..(29): a, c, t, or g
  modified_base (45)..(45): a, c, t, or g
tgagcttcccdccgccctayrhbraaarnbdvvykyvvvbyrymnttataargctcbcaarbckaarkrcatttswmgsttatggtgacttcccgyamcacattgcgacatgcaaatactgcggagygyhcctccccwggcaactcctcgctgggacgcamgcgcrctrcgtgctcccgcctttkgactgmgccggcgayacytgggagagrgttgatgacgtcagcgttctggctccatggc

SEQ ID NO: 613 - DNA, 246 bp, Artificial Sequence
  Description of Artificial Sequence: Synthetic polynucleotide
  modified_base (22)..(22): a, c, t, or g
  modified_base (29)..(29): a, c, t, or g
  modified_base (31)..(33): a, c, t, or g
  modified_base (39)..(41): a, c, t, or g
  modified_base (45)..(45): a, c, t, or g
  modified_base (79)..(79): a, c, t, or g
  modified_base (118)..(119): a, c, t, or g
  modified_base (131)..(133): a, c, t, or g
tgagcttcycdccgccctrydnbvrarvnbnnnbkyvvnnnryvnttataargctcbcamvbckaarkryatttshmvnttatggtgacttcccgyamcrcattgcgacatgcaaatnntgmggagygyhnnnccycyycwrrmaactcctmgcygggacgcamgcgyrytdcrtsmtcccgcctytkgrcygmrcssgcgryrcytgggakarrgttgatgacrycascrttctggctccatggc

SEQ ID NO: 614 - DNA, 246 bp, Artificial Sequence; identical to SEQ ID NO: 613
  Description of Artificial Sequence: Synthetic polynucleotide
  modified_base (22)..(22): a, c, t, or g
  modified_base (29)..(29): a, c, t, or g
  modified_base (31)..(33): a, c, t, or g
  modified_base (39)..(41): a, c, t, or g
  modified_base (45)..(45): a, c, t, or g
  modified_base (79)..(79): a, c, t, or g
  modified_base (118)..(119): a, c, t, or g
  modified_base (131)..(133): a, c, t, or g

SEQ ID NO: 615 - DNA, 244 bp, Megaderma lyra
tgagcttccctccgccctatgggaagtaagagattcacgccggttatataagattcctgtaactaaagaaatttcaaggatagggtgacttcccacaatacaaagcgacatgcaaatatcgcggggcgtgcctgtcctgacctttgtgagactcttcgctaggacgcaggcgtgctgcgagttcccgccttatcggcgaggcctgggggagagttgatcacgccaacattcgggctccatggcg

SEQ ID NO: 616 - DNA, 244 bp, Megaderma lyra
tgagcttccctccgccctatgggaagtaagaggttcacgccggttatataagattcctgtaactaaagaaatttcaaggatagggtgacttcccacaatacaaagcgacatgcaaatatcgcggggcgtgcctgtcctgacctttgtgagactcttctctaggacgcaggcgtgctgcgagttcccgccttatcggcgggtactggggaagagttgatgacgccaacattcgggctccatggcg

SEQ ID NO: 617 - DNA, 252 bp, Rhinolophus ferrumequinum
tgagcttccctccgccctacgcgtaaaataccctgctcgcagattatataagactcctgtacctaaagacatttcaagggtagggtgacttcccacaacacatagcgacatgcaaatagagggtgtgtctcccctggcccctgtgggcgtcttctcgctaggacgcacgcgcgctgcgttttcccgccttctggctttaggtctgcgagtcccgggaaaggattgattacgtcaacattcgggcttcatggc

SEQ ID NO: 618 - DNA, 252 bp, Rhinolophus ferrumequinum; identical to SEQ ID NO: 617

SEQ ID NO: 619 - DNA, 252 bp, Rhinolophus ferrumequinum
tgagcttccctccgccctacgcgtaaaatacgctgctcgcagattatataagactcctgtacctaaagacatttcaagggtagggtgacttcccacaacacatagcgacatgcaaatagagggtgtgtctcccctggcccctgtgggcgtcttctcgctaggacgcacgcgcgctgcgttttcccgccttctggctttaggtctgcgagtcccgggaaaggattgattacgtcaacattcgggcttcatggc

SEQ ID NO: 620 - DNA, 252 bp, Rhinolophus ferrumequinum
tgagcttccctccgccctacgcgtaaaatacgctgctcgcagattatataagactcctgtacctaaagacatttcaagggtagggtgacttcccacaacacatagcgacatgcaaatagagggtgtgtctcccctggcccctgtgggcgtcttctcgctaggacgcacgcgcgctgcgttttcccgccttctggctttaggtcggcgagtcccgggaaaggattgattacgtcaacattcgggcttcatggc

SEQ ID NO: 621 - DNA, 252 bp, Rhinolophus sinicus
tgagcttccctccgccctatgcgtaaaacttttcttccacagattatataaggttcctgaacctaaagacatttcaagagtagggtgacttcccacaacacatagcgacatgcaaatgtagggtgtgtctcccctggcccttgtgggcgtcttctcgctaggacgcacgcgcgctgccttttcccggcttctggctctagatctgcgagtccggggaaaggatcgattacgtcaacattcgggcgtcatggc

SEQ ID NO: 622 - DNA, 252 bp, Hipposideros galeritus
tgagcttccctccgccctatgcgtaaaaaggagttcacggcgactatataaggttcccgtacgtagtgacatttcaagattatggtgacttcccacaatacatagcgacatgcaaataaagggtgtgttctcgtctgtcccccctgtgggcgtcttcttgctaggacgcacgcgcgctgcgttttcccgccttgtgattctgggcaagtcctgggaaaggattgattacgtcaacattcgggcttcatggcg

SEQ ID NO: 623 - DNA, 255 bp, Hipposideros armiger
tgagcttccctccgccctacgcgtaaaacaggcttaacggtgactatataaggttcctgtacctaatgacatttcaagattagggtgacttcccacaatacatagcgacatgcaaataagggggggtttccggtcggtcccccgtgggcgtcttcttgatagaacgcacgcgcgctgcgttttcccgccttgtgattctgggatcggcaagtcctgggaaaggattggttacgtcaacattcgggcttcatggcg

SEQ ID NO: 624 - DNA, 261 bp, Eonycteris spelaea
tgagcttccctccgccctatgagaaaacgaacaactcggagaatatataaggctcccatatctgaaggcattttaagaatagggtgatttcccacaatacatagcgatatgtaaatgtagtgggacatgccttccctgtcccttgtgggcagcttctcgccaggacgcacgcgcgctgcgtgttcccgccttgtgactaaattggcgagtctgggaggagactgatgatgtcagcatcatcaactttcccgctccatggcg

SEQ ID NO: 625 - DNA, 261 bp, Rousettus aegyptiacus
tgagcttcctccgccctatgagggaagactgtcgtagggagaatatataaggctcccatatcgctagacattttaagatgagggtgatttcccacaatgcatagcgacatgtaaatgaagcgaggcatgctttccctgtcccttgtgggcagcttctcgccaggacgcacgcgcgctgcgtgttcccgccttgtgactaaattggcgagtctgggaggagactgatgatgtcagcatcatcaacttttctgctccatggcg

SEQ ID NO: 626 - DNA, 261 bp, Rousettus aegyptiacus; identical to SEQ ID NO: 625

SEQ ID NO: 627 - DNA, 261 bp, Rousettus aegyptiacus; identical to SEQ ID NO: 625

SEQ ID NO: 628 - DNA, 261 bp, Rousettus aegyptiacus; identical to SEQ ID NO: 625

SEQ ID NO: 629 - DNA, 262 bp, Rousettus leschenaultii
tgagcttccctccgccctatgagggaagactgtcgtagggagaatatataaggctcccatatcgctagacattttaagatgagggtgatttcccacaatgcatagcgacatgtaaatgaagtggggcatgctttccctgtcctttgtgggcagcttctcgccaggacgcacgcgcgctgcgtgtttccgccttgtgactaaattggcgagtctgggaggagactgatgatgtcagcatcatcaactttcccgctccatggcg

SEQ ID NO: 630 - DNA, 262 bp, Pteropus pselaphon
tgagcttccctccgccctacgcgagaagaattcttcacgcagaatatataaggatcccatatctgaagacattttacgattacggtgatttcccacaacacatagcgacatgtaaatgtagtggggcatgcctcccctgtcccttgtgggcagcttctcgccagaacgcacgcgcggtgcgtgttcccgccttgtgactaagttggcgagtcagggaggagattgatgatgtcatcatcgtcagctcacccgctccatggcg

SEQ ID NO: 631 - DNA, 262 bp, Pteropus vampyrus
tgagcttccctccgccctaagcgagaaaaactcttcaagcagaatatataaggatcccatatctgaagacattttacgattacggtgatttcccacaacacatagcgacatgtaaatgtagtggggcatgcctcccctgtcccttgtgggcagcttctcgccagaacgcacgcgcggtgcgtgttcccgccttgtgactaagttggcgagtcagggaggagattgatgatgtcatcatcgtcagctcacccgctccatggcg

SEQ ID NO: 632 - DNA, 263 bp, Pteropus giganteus
tgagcttccctccgccctacgcgagaaaaattcttcacgcagaatatataaggattcccatatctgaagacattttacgatgacggtgatttcccacaacacatagcgacatgtaaatgtagtggggcatgcctcccctgtcccttgtgggcagcttctcgccagaacgcacgcgcggtgcgtgttcccgccttgtgactaagttggcgagtcagggaggagattgatgatgtcatcatcgtcagctcacccgctccatggcg

SEQ ID NO: 633 - DNA, 262 bp, Pteropus alecto
tgagcttccctccgccctacgagagaaaaagcctgcacgcagaatatataaggatcccatatctgaagacattttacggttacggtgatttcccacaacacatagcgacatgtaaatatagtggggcatgcctctcctgtcccttgtgggcagcttctcgccagaacgcacgcgcggtgcgtgttcccgccttgtgactaagttggcgagtcagggaggagattgatgatgtcatcatcgtcagctcacccgctccatggcg

SEQ ID NO: 634 - DNA, 262 bp, Macroglossus sobrinus
tgagcttccctccgccctatgagaaaacatcttctcatgtgcaatatataaggctcccatgtctaaagacattttaaggttagggtgatttcccacaatacacagcgacatgtaaatgtactggagcttgcctcccctatcccttgagggtggtttctcgacaggacgcacgcgcgctgcgtgttcccgcctagttactaaattggcgagtctgggaagagattgatgacgtcaatatcatcaactttcccgctccatggcg

SEQ ID NO: 635 - DNA, 219 bp, Cynopterus brachyotis
tgagcttccctccgccctatgaggaaagccggccttgcggagactatataaggctcccccatctgaggacattttaacgctagggtgatttcccacaaggcacagcgacatgcaaatacagtgggcgtgcctcccctgcgccttcccgcctcgtggctgaactggcgagtcggggaggggggtgatgacgtcacatcgtccgctttcccgctccatggc

SEQ ID NO: 636 - DNA, 255 bp, Pteronotus parnellii
tgagcttccctccgcccttcagaaaagctgctctttctgctgaaaaatatatgagccccataccttaaggcctttatcggttagggtgacttcccacaatacatggcaacatgcaaatatagaagggcgtgccttcagtgtccggagcaggcaccgtctcgccgggacgcgcgcactgcgtgttcttgctttttgactctaggcgggcgactcttgggagagggttgttgacgtcaacattcacgctccatggcg

SEQ ID NO: 637 - DNA, 253 bp, Tonatia saurophila
tgagcttccctccgccctataagagattaccgattcctgctggagaatatatgaggcccactcttcgagaccttttatggttacggtaacttcccataacacatagcgacatgcaaatatcgtgggatgtgcctccgtggtcccttgcggaaaccatcttgcccatcagcacgctaggtattcccgccttctgactctaggcgggcgaatcccaggagagggttgttgacgtccacattcgggcaccatggcg

SEQ ID NO: 638 - DNA, 251 bp, Phyllostomus discolor
tgagcttccctccgccctacgggagaaagctaagccgtgttggaaaatatatgaggcccactcttcaagaccttttatgattatggtaatttcccatgacacatagcgacatgcaaatacagtgggtggtgcctgcacggtccttgcggacaacctcttgcccgtgagcgcgccgggtattcccgccttctgactctaggcggggaatcctaggagagggttgttgacgtagacatttgggcaccatggcg

SEQ ID NO: 639 - DNA, 251 bp, Phyllostomus discolor
tgagcttccctccgccctacgggagaaagctaggccgtgttggaaaatatatgaggcccactcttcaagaccttttatgattatggtaatttcccatgacacatagcgacatgcaaatacagtgggtggtgcctgcacggtccttgcggacaacctcctgcccgtgagcgcgccgggtattcccgccttctgactctaggcggggaatcctaggagagggttgttgacgtagacatttgggcacaatggcg

SEQ ID NO: 640 - DNA, 252 bp, Micronycteris hirsuta
tgagcttccctccgccctacaagggcaacagtaggcgtggtggaaaatatatgaggcccattgctaaggatcttttatggttagggtgatttcccacaatacatagcgacatgcaaatatagtgagtgtgcttccactgtcctttgcggacaccgtctcgcccgtaagcgcactgggtattcccgccttttgactctaggcgggcaaatcctgggagagggttgttgacgtcaacattcgggctccatggcg

SEQ ID NO: 641 - DNA, 255 bp, Macrotus californicus
tgagcttccctccgccctatggaagggaagtttgtaatgctggaaaatatatgagaccaactcctaaggaccttttacagttagggtgacttcccacaacacatagcgacatgcaaataccacgaggcgtgcttccactgtcctttgcggacaccgtctcgcccgtcagcgggcgctgtgtattcccgccttttgactctagacgggcgaatcctgggagagggttgttgacgtcaacattcgggctctatggcg

SEQ ID NO: 642 - DNA, 253 bp, Anoura caudifer
tgagcttccctccgccctacggaagagaagcctcctctgatggaaaatatatgagacccattcctcaagaccttttttggtgacggtgacttcccacaacacacagcgacatgcaaatgtcgtggggtgtgcctccacagtcacgcgcggacgccgtcttgcccttgcgcgcgctgtgcattcccgcctcttgactctaggccgacgaatcctgggagagggctgttgacgacgacattcgggctccatggcg

SEQ ID NO: 643 - DNA, 252 bp, Artibeus jamaicensis
tgagcttccctccgccctacgaggaaataagcaaccctggtggcaaatataggaagcccattcctcaagaccttttaagcttacggtgacttcccacaatacatagcaacatgcaaatattgtggggtgtgccttcaccgtcctttgaggtcacagtcttgcccataagcgcgctgtgtaatcccgccttttgacgttaggcaggcgaatcctgggagagggttgctgacgtcgacattcggctccatggcg

SEQ ID NO: 644 - DNA, 252 bp, Artibeus jamaicensis
tgagcttccctccgccctacgaggaaataatctcccctggtggcaaatataggaagcccattcctcaagaccttttaaggttacggtgacttcccacaatacatagcaacatgcaaatattgtggggtgtgccttcactgtcctttgcggttactatcttgcccttaagcgcgctgtataatcccgccttttgacgttaggcaggcgaatcctgggagagggttgcttacgtcgacactcggctccatggcg

SEQ ID NO: 645 - DNA, 252 bp, Sturnira hondurensis
tgagcttccctccgccctataaggaagctcaactttgcggtgggaattatatgaggcccatttctcaagaccttttgccattatggtgacttcccacaatacatagcaatatgcaaaaatagtagggtgtgcctccactgtcctttgcggaccctgtcgctgtcgtaagcgcgctgtgtgatcccgccttttgactctaggcgggcgaatcctgggagagggttgttgacgtcgacattcggctccatggcg

SEQ ID NO: 646 - DNA, 252 bp, Carollia perspicillata
tgagcttccctccgccctacaaagaagtgacgtgcttcggaagaaaatatatgagacccactcctcaagaccttttacggttatggtgacttcccacagcacatagcgacatgcaaatatcgtgcgacgtgccccactgtcctttgcggacaccgccttgcccgtaaacgctctgtgtattcccgccttttgactctaaactggcgaatcctaggagagagtggttgtcgtagacgttcgggcgccatggcg

SEQ ID NO: 647 - DNA, 253 bp, Mormoops blainvillei
tgagcttccctccgccctatgggaggaaaacagcctttcacgcaaaatatatgaggcccatatgtgaggacctttcacgcttatggtgacttcccacaacacatagcgacatgcaaatatcgcaggacttgcttccactttcctttgggtatcgtctcgcccggaagcgcgcgctgtttgttcccgccttttgcttctaggcgagcgaatcctgggagagggctgttgacgtcaatattcgggctcaatggcg

SEQ ID NO: 648 - DNA, 250 bp, Desmodus rotundus
gagcttctctccgccccttaactcagagactgatcgtgaataaatatggggcccaagtctcaggaactcttttggttacggtgatttcccacaatacatagcgacatgcaaatatagtggggtgcgcttccacagtcctttgcggacaccgtccagcccgtaagcgctcgctgtgtagtcccgcctttagactccaggtgagcgaatcctgggagagggttgctgacgttgacattcggcctccatggcg

SEQ ID NO: 649 - DNA, 225 bp, Tadarida brasiliensis
tgagcttcctccgccctgggggagaaggcgctttctgcgggttatataaggctccagcacctagaggcctctaacagttagggtgatttcccataatgcatagcgacatgcaaatatgtctgggtgtgctgtccctgtttcttgcctgcgagttcccgcctttggactgcaggcgggcgaatcctgggagagagttgatgacgtcaccactcaggctccatggcg

SEQ ID NO: 650 - DNA, 239 bp, Molossus molossus
tgagcttcctccgccctgggggagaagctgctttccacggattatataaggctccagcacctacagccctttaacagttagggtgatttcccacagtgcatagcgacatgcaaatgtagttgagtgtgctttccctgttccttgcctgcatcttcttgcctgcgtgttcccgccttttgactgcacgcgggcgaatcctgggagagagttgatgacgtcaacgctcaggttctatggcg

SEQ ID NO: 651 - DNA, 256 bp, Miniopterus schreibersii
tgagcttccctccgccctgggggagaaacggcatggtggccaatatataaggatcccgtacctaaaggcctttcacgcttagggtgacttcccacaacacatagcgacatgcaaatatagttaggcgcgcttccccggtccttcgcgggcttcttttggcccggacgcgtgcgcgcgctgcgtgttcccgccttttggctcggggcgggcgaatccagggagagagtgatgatgtcaacattcgggctccatggcg

SEQ ID NO: 652 - DNA, 256 bp, Miniopterus natalensis
tgagcttccctccgccctgggggagaaacggcatggtggccaatatataaggatcccgtacctaaaggcctttcacgcttagggtgacttcccacaacacatagcgacatgcaaatatagttaggcgcgcttccccggtccttcgccggcttcttttggcccggacgcgtgcgcgcgctgcgtgttcccgccttttggctcggggcgggcgaatccagggagagcgtgatgatgtcaacattcgggctccatggcg

SEQ ID NO: 653 - DNA, 256 bp, Pipistrellus pipistrellus
tgagcttccctccgccctgaggaaaggagcctcacacggcggctatataaggccccctgccctgtaggcctttcacagttagggcgacttcccacaacacatagcgacatgcaaatgtggatgggcgtgcctccccggtccctgccggcaacttctctctcggacgcgcgctcgcgctgagtgttcccgccttttgactccagcggagcgaatccggggagcgggcggatgacgtcaacagtgcggctccatggcg

SEQ ID NO: 654 - DNA, 256 bp, Pipistrellus pipistrellus
tgagcttccctccgccctgaggaagggagcctcacacggcggctatataaggccccctgccctgtaggcctttcacagttagggcgacttcccacaacacatagcgacatgcaaatgtggatgggcgtgcctccccggtccctgccagcaacttctctccgggacgcacgctggcgctgagtgttcccgccttttgacgccagcggagcgaatccggggagcgggcggatgacgtgaacagtgcggctccatggcg

SEQ ID NO: 655 - DNA, 254 bp, Pipistrellus pipistrellus
tgagcttccctccgccctgaggaagggagcctcacacggcggctatataaggccccctgccctgtaggcctttcacagttagggcgacttcccacaacacatagcgacatgcaaatgtatgggcgtgcctccccggtccctgccagcaacttctctccgggacgcacgctggcgctgagtgttcccgccttttgacgccagcggagcgaatccggggagcgggcggatgacgtgaacagtgcggctccatggcg

SEQ ID NO: 656 - DNA, 256 bp, Pipistrellus pipistrellus
tgagcttccctccgccctgaggaagggagcctcacacggcggctatataaggccccctgccctgtaggcctttcacagttagggcgacttcccacaacacatagcgacatgcaaatgtagatgggcgtgcctccccggtccctgccggcaacttctctccgggacgcgcgctcgagctgagagttcccgcctgttgacgccagccgagcgaatccggggagcgggcggatgacgtcaacagtgcggctccatggcg

SEQ ID NO: 657 - DNA, 257 bp, Pipistrellus kuhlii
tgagcttccctccgccctgaggaacggagcttcacacggcgactatataaggccccctgccctgtaggcctttcacagttagggcgactttcccacaacacatagcgacatgcaaatgtggatgggcgtgcctccccggtccctgcaagcaacttctctcccggacgcgcgctcgcgctgagtgttcccgccttttgacgccagcggagcgaatccggggagcgggcggatgacgtgaacagtgcggctccatggcg

SEQ ID NO: 658 - DNA, 255 bp, Lasiurus borealis
tgagcttccctccgccctgaggaagacggcttcacacgagggctatataaggcccccttacctataggtccttttcggttagagtgacttcccacaacacctagcgacatgcaaatttagatgggcgtgcctcctctgtcgctgtggcaacacctctccgggacgcgcgctcgctctgagtgttcccgccttttgactccagccgaacgaatcctgggagagggcagatgacgtcaatagtcaggctccatggcg

SEQ ID NO: 659 - DNA, 254 bp, Aeorestes cinereus
tgagcttccctccgccctggggaagagggcctcacacgagagctatataaggcccccttacctataggccttttatggttagagtgacttcccacaacacctagcgacatgcaaatttagatgggcgtgcctcctctgtccctgtggcaacacctctccgggacgcgcgctcgctctgagcgttcccgccttttgactccagccgaacgaatcctgggagagggcagtgacgtcaatagtcaggctccatggcg

SEQ ID NO: 660 - DNA, 255 bp, Aeorestes cinereus
tgagcttccctccgccctggggaagagggcctcacacgagggctatataaggcccccttacctagaggccttttatggttagagtgacttcccacaacacctagcgacatgcaaatttagatgggcgtgcctcctctgtccctgtggcaacacctctccgggacgcgcgctcgctctgagcgttcccgccctttgacttccagccgaacgaatcctgggagagggcagtgacgtcaatagtcaggctccatggcg

SEQ ID NO: 661 - DNA, 257 bp, Eptesicus fuscus
tgagcttccctccgccctggggaagcgagcgtcacacggcggatatataaggcccccttacctgaaggccttttacggttagggtgacttcccacaacacttagcgacatgcaaatttagacgggcgtgcctccccgtccctgtgggcaacttctctcctggacacgcgcgctcgcgctgagtgttcccgccttttgactccagccgagcgaatcctgggagagggcagatgacgtcaacagtcaggctccatggcg

SEQ ID NO: 662 - DNA, 256 bp, Nycticeius humeralis
tgagcttccctccgccctggggaagcgaggcctccttgccggctatataaggcccccttatcaacaggccttttacggtgagggtgacttcccacaacacatagcgacatgcaaatttagatgggcgtgcctcccctgtccctgtgggcaactcctctcccggacgcgcgctggcgcggagtgttcccgccacttgactccagccgagcgaatcctgggagcggccagatgacgtcagtagccgggctccatggcg

SEQ ID NO: 663 - DNA, 225 bp, Murina aurata
tgagcttccctccgccctgaggaagggaggcccagcaggcgggtatataaggcctccttgagtagagtccttttaggaatagggtgacttcccacaacacatggcgacatgcaaatttgatgggcgtgcctccgccgtccctgcgggcagcgttcccgccttttgactgcagccgagcggatcctgggagagggcgggtgacgtcagcagtccggctccatggcg

SEQ ID NO: 664 - DNA, 256 bp, Myotis myotis
tgagcttccctccgccctggaaaaaggctctccacacggcgggtatataaggcccccttatgtataatcctttaccggttagggtgacttcccacaacgcatagcgacatgcaaatttgacgggcgtgcctcctccgtccctgcgggcaacttctctcctggacgcgcgctcgcgctgcgtgttcccgccttttgactccagccaagcgaatcctgggagagggcaggtgacgtccaacagtcaggctcgatggcg

SEQ ID NO: 665 - DNA, 256 bp, Myotis myotis; identical to SEQ ID NO: 664

SEQ ID NO: 666 - DNA, 256 bp, Myotis lucifugus
tgagcttccctccgcccttgggagaaggaggcgtagacggcggatatataaggcccccttatgtgtagtccttttacggttagggtgacttcccacaacgcatagcgacatgcaaatttgacgggcgtgcctcctctgtccctgcgggcaacttctctcctggacgcgcgctcgcgctgcgtgttcccgccttttgactccagccgagcgaatcctgggagagggcaggtgacgtcaacagtcaggctcgatggcg

SEQ ID NO: 667 - DNA, 256 bp, Myotis brandtii
tgagcttccctccgcccttggaggaaggggaaggacatggcggatatataaggcccccttatgtatagtccttttgcagttagggtgacttcccacaacgcatagcgacacgcaaatttgacgggcgtgcctcttctgtctctgcgggcaacttctctcctggacgcgcgctcgcgctgcgtgttcccgccttttgactccagccgagcgaatcctgggagagggcaggtgacgtcaacagtcaggctcgatggcg

SEQ ID NO: 668 - DNA, 256 bp, Myotis davidii
tgagcttccctccgccctggagaggggctgtgcacacggcggatatataaggcccccttatgaataaccctttataagttatggtgatttcccacaacgcatagcgacatgcaaattcgatgggcgtgcctcctctgtccctgcaggcaacttctctcctggacgcgcgctcctcgctgcgtgttcccgccttttgactccagccgagcgaatcctgggagagggcaggtgacgtcaacagtcaggctcgatggcg

SEQ ID NO: 669 - DNA, 256 bp, Antrozous pallidus
tgagcttccctccgccctggggaaaggggccctacacggcggctatataaggcccccttaccgataggtctttatcggttagtgtgacttcccacaacacatcgcgacatgcaaatgtagatgggcgtgcctcccctgtcccctggcacatgtagatgggcgcggcgctcgcgctgagtgttcccgcctttgggctccagcagagcgaatcttgggagagggcaggtggtgacgtccatagccaggctccatggcg

SEQ ID NO: 670 - DNA, 252 bp, Noctilio leporinus
tgagcttccctccgccctacaaggaaatttgggctcctgcacgaaaatatatcaggctcaaatctgaatgcctttcttggttatggtgacttcccacaatacatagcgatatgcaaatatagtggtgtgtgccttccctcttcctctagtctcgtcgccaggaagtgagagagccacttgctcccgtctttgactttttgcgggcgaattctgggagagggttgatgacgtcaatattcgggctccatggcg

SEQ ID NO: 671 - DNA, 220 bp, Craseonycteris thonglongyai
tgagcttcccgccgccctacgagaaaaggactgcccatctcgcttttataagattgctatatcgaactatattttaaggttagggtgacttcccacaatacaaagcgatatgcaaatatggagggcgtgtctcctttggccaggacacaagcctgctgctgcctgttcccgccttgtttgctagtcctgggagaggtttgatgacgttgacaccatggcg

SEQ ID NO: 672 - skipped

SEQ ID NO: 673 - DNA, 258 bp, Artificial Sequence
  Description of Artificial Sequence: Synthetic polynucleotide
  modified_base (19)..(19): a, c, t, or g
  modified_base (37)..(37): a, c, t, or g
  modified_base (54)..(54): a, c, t, or g
  modified_base (120)..(120): a, c, t, or g
  modified_base (123)..(123): a, c, t, or g
  modified_base (145)..(145): a, c, t, or g
  modified_base (169)..(174): a, c, t, or g
  modified_base (201)..(202): a, c, t, or g
tgagcttccctccgccctnbgrgrrrrrvvbbyywsnygsmrrmtatataaggnycccwywyctvwagrcmtttyamgrttasggtgayttcccacaayacatagcgacatgcaaatrwnghngggygtgcctycmckgtccytngysgrcrdcktctykcyvgkamgnnnnnncgcgctgmgtrttcccgccttktgacnnyarvykrgcgartcckgggagrggrywgwtgacgtcaacaktcvggctccatggcg

SEQ ID NO: 674 - DNA, 270 bp, Artificial Sequence
  Description of Artificial Sequence: Synthetic polynucleotide
  modified_base (19)..(19): a, c, t, or g
  modified_base (31)..(33): a, c, t, or g
  modified_base (40)..(40): a, c, t, or g
  modified_base (57)..(58): a, c, t, or g
  modified_base (123)..(124): a, c, t, or g
  modified_base (126)..(126): a, c, t, or g
  modified_base (148)..(148): a, c, t, or g
  modified_base (151)..(151): a, c, t, or g
  modified_base (156)..(156): a, c, t, or g
  modified_base (164)..(164): a, c, t, or g
  modified_base (166)..(169): a, c, t, or g
  modified_base (172)..(177): a, c, t, or g
  modified_base (180)..(181): a, c, t, or g
  modified_base (204)..(205): a, c, t, or g
  modified_base (219)..(219): a, c, t, or g
  modified_base (243)..(251): a, c, t, or g
tgagcttccctccgccctnbrvgdrrrdvvnnnbbbbdbnbgsvrrhtatatragrnnccydywyskvwagrcmtttywhrrktasggtgayttcccacaayrcatagcgacatgyaaatdhnnhnrggyrtgcytychckgkccyyngynrrmrncdyctyknynnnnmgnnnnnnsgnnctghghrttcccgccttbtgrcnnyrrvybrgcgartncdgggarrrgrywgdtkaygtcrnnnnnnnnnacwktyvsgctcsatggcg

SEQ ID NO: 675 - DNA, 270 bp, Artificial Sequence
  Description of Artificial Sequence: Synthetic polynucleotide
  modified_base (9)..(9): a, c, t, or g
  modified_base (19)..(19): a, c, t, or g
  modified_base (29)..(34): a, c, t, or g
  modified_base (40)..(40): a, c, t, or g
  modified_base (57)..(58): a, c, t, or g
  modified_base (123)..(126): a, c, t, or g
  modified_base (148)..(148): a, c, t, or g
  modified_base (151)..(151): a, c, t, or g
  modified_base (155)..(156): a, c, t, or g
  modified_base (160)..(162): a, c, t, or g
  modified_base (164)..(169): a, c, t, or g
  modified_base (171)..(177): a, c, t, or g
  modified_base (179)..(181): a, c, t, or g
  modified_base (185)..(185): a, c, t, or g
  modified_base (200)..(200): a, c, t, or g
  modified_base (203)..(205): a, c, t, or g
  modified_base (208)..(208): a, c, t, or g
  modified_base (219)..(219): a, c, t, or g
  modified_base (243)..(251): a, c, t, or g
tgagcttcnctccgccctnbrvrdrrrdnnnnnnbbbdbnbvvvrrhtatatragrnnccydbhyskvdrgdymttthwhrrkkabggtgayttcccacaayrcahagcgacatgyaaatdhnnnnrgryrtgyytychcbgkccyyngynrdmnnydynnnknnnnnnmnnnnnnnsnnnsygnbhdwtcccgccttbngrnnnyrnvbbrgcgartncdgggarvrrrydgdtkaygtvrnnnnnnnnnrywbwbvsgcwysatggcg

SEQ ID NO: 676 - DNA, 270 bp, Artificial Sequence
  Description of Artificial Sequence: Synthetic polynucleotide
  modified_base (9)..(9): a, c, t, or g
  modified_base (19)..(19): a, c, t, or g
  modified_base (28)..(38): a, c, t, or g
  modified_base (40)..(41): a, c, t, or g
  modified_base (47)..(47): a, c, t, or g
  modified_base (57)..(58): a, c, t, or g
  modified_base (63)..(64): a, c, t, or g
  modified_base (79)..(79): a, c, t, or g
  modified_base (122)..(126): a, c, t, or g
  modified_base (139)..(139): a, c, t, or g
  modified_base (141)..(141): a, c, t, or g
  modified_base (143)..(143): a, c, t, or g
  modified_base (148)..(153): a, c, t, or g
  modified_base (155)..(181): a, c, t, or g
  modified_base (183)..(185): a, c, t, or g
  modified_base (189)..(189): a, c, t, or g
  modified_base (199)..(208): a, c, t, or g
  modified_base (211)..(211): a, c, t, or g
  modified_base (219)..(219): a, c, t, or g
  modified_base (221)..(221): a, c, t, or g
  modified_base (231)..(231): a, c, t, or g
  modified_base (234)..(234): a, c, t, or g
  modified_base (243)..(251): a, c, t, or g
  modified_base (258)..(258): a, c, t, or g
  modified_base (264)..(264): a, c, t, or g
tgagcttcnctccgccctnbrvrdrrdnnnnnnnnnnnbnnvvvvrntatatragrnncchdnnhbkvddrdhmttthnhrvdkabrgyrayttcccayaayrcmhrgcrayatgyaaatdnnnnnrrdbdygyykbynbnsnyyybnnnnnnhnnnnnnnnnnnnnnnnnnnnnnnnnnnsnnnbhdntcccgcctynnnnnnnnnnvbndrcrartncnrggarvrrrndgntkaygyvrnnnnnnnnnrywbhbnbgcdynatggcg

SEQ ID NO: 677 - DNA, 281 bp, Artificial Sequence
  Description of Artificial Sequence: Synthetic polynucleotide
  modified_base (9)..(9): a, c, t, or g
  modified_base (19)..(20): a, c, t, or g
  modified_base (24)..(24): a, c, t, or g
  modified_base (27)..(41): a, c, t, or g
  modified_base (43)..(44): a, c, t, or g
  modified_base (47)..(47): a, c, t, or g
  modified_base (57)..(59): a, c, t, or g
  modified_base (63)..(66): a, c, t, or g
  modified_base (69)..(71): a, c, t, or g
  modified_base (73)..(73): a, c, t, or g
  modified_base (80)..(81): a, c, t, or g
  modified_base (84)..(84): a, c, t, or g
  modified_base (94)..(94): a, c, t, or g
  modified_base (124)..(129): a, c, t, or g
  modified_base (138)..(138): a, c, t, or g
  modified_base (141)..(145): a, c, t, or g
  modified_base (147)..(148): a, c, t, or g
  modified_base (150)..(194): a, c, t, or g
  modified_base (203)..(218): a, c, t, or g
  modified_base (221)..(221): a, c, t, or g
  modified_base (226)..(226): a, c, t, or g
  modified_base (228)..(228): a, c, t, or g
  modified_base (237)..(242): a, c, t, or g
  modified_base (244)..(244): a, c, t, or g
  modified_base (251)..(252): a, c, t, or g
  modified_base (254)..(262): a, c, t, or g
  modified_base (266)..(273): a, c, t, or g
  modified_base (275)..(275): a, c, t, or g
tgagcttcnckccgcccynnrvvnvvnnnnnnnnnnnnnnnvnnvvntwwakvwrvnnnbyhnnnnbdnnndnhmyythnnvvnkabdgyraynttcccayrrbrchhvgcrayaygyaaawdnnnnnnddbdysybnbynnnnnbnnbnnnnnnnnnnnnnnnnnnnnnnnnnnnnnnnnnnnnnnnnnnnnntyyygbyhnnnnnnnnnnnnnnnndrndrvknynrggrrvrvnnnnnngntbwyghnnvnnnnnnnnnvydnnnnnnnnynatggcg

SEQ ID NO: 678 - DNA, 201 bp, Artificial Sequence
  Description of Artificial Sequence: Synthetic polynucleotide
  modified_base (1)..(1): a, c, t, or g
  modified_base (4)..(4): a, c, t, or g
  modified_base (14)..(14): a, c, t, or g
  modified_base (44)..(49): a, c, t, or g
  modified_base (58)..(58): a, c, t, or g
  modified_base (61)..(65): a, c, t, or g
  modified_base (67)..(68): a, c, t, or g
  modified_base (70)..(114): a, c, t, or g
  modified_base (123)..(138): a, c, t, or g
  modified_base (141)..(141): a, c, t, or g
  modified_base (146)..(146): a, c, t, or g
  modified_base (148)..(148): a, c, t, or g
  modified_base (157)..(162): a, c, t, or g
  modified_base (164)..(164): a, c, t, or g
  modified_base (171)..(172): a, c, t, or g
  modified_base (174)..(182): a, c, t, or g
  modified_base (186)..(193): a, c, t, or g
  modified_base (195)..(195): a, c, t, or g
nvvnkabdgyraynttcccayrrbrchhvgcrayaygyaaawdnnnnnnddbdysybnbynnnnnbnnbnnnnnnnnnnnnnnnnnnnnnnnnnnnnnnnnnnnnnnnnnnnnntyyygbyhnnnnnnnnnnnnnnnndrndrvknynrggrrvrvnnnnnngntbwyghnnvnnnnnnnnnvydnnnnnnnnynatggcg

SEQ ID NO: 679 - DNA, 231 bp, Galeopterus variegatus
tgagcttccctccgccctaccccccaagtgggccacaggcggtatttataaggcttacagccctaaagacatttaccattatggtgacttcccataatacatagcgacatgcaaaattgaggggcgtgccagacgggcgtcgtctctccgaagcgcacgcgcgctgcgtgttcccgccgcgtgacacggcccgcgattcctgagagcgagttggtgacgtgaacccatggc

SEQ ID NO: 680 - DNA, 231 bp, Galeopterus variegatus
tgagcttccctccgccctaccccccaagtggcccacaggcggtatttataaggcttacagccctaaagacatttaccattatggtgacttcccataatacatagcgacatgcaaaattgaggggcgtgccagacgggcgtcgtctctccgaagcgcacgcgcgctgcgtgttcccgccgcgtgacacggcccgcgattcctgagagcgagttggtgacgtgaacccatggc

SEQ ID NO: 681 - DNA, 231 bp, Artificial Sequence
  Description of Artificial Sequence: Synthetic polynucleotide
tgagcttccctccgccctaccccccaagtggsccacaggcggtatttataaggcttacagccctaaagacatttaccattatggtgacttcccataatacatagcgacatgcaaaattgaggggcgtgccagacgggcgtcgtctctccgaagcgcacgcgcgctgcgtgttcccgccgcgtgacacggcccgcgattcctgagagcgagttggtgacgtgaacccatggc

SEQ ID NO: 682 - DNA, 265 bp, Procavia capensis
tgagcttccctccgccctatagggtaaatcggcgctgctcagcatttaaaagaatcccaaatgtgtcgccattttacgcttagggtgatatcccacaagacacagcgacatgcaaatatcgtgagtctctgggaggtgagtttccctgtccacgagggcgtcctctcgctggggcgcacgcgcggtgtgtgtgcccccgttgtgtgttcccgctctttgattccaaagaactggttgataacgttagacttccggctgcatggcg

SEQ ID NO: 683 - DNA, 265 bp, Heterohyrax brucei
tgagcttccctccgccctatagggtaaatcggcgctgctcagcatttaaaagaatcccaaatgtgtagccattttacgcttagggtgatatcccacaaggcgcagcgacatgcaaatatcatgcgtctctgagaggtgagtttccctgtccacgagggcgtcctctcgctggggcgcacgcgcggtgtgtgtgcccccgttgtgtgttcccgctctttgattccaaagaactggttgataacgttagacttccggctccatggcg

SEQ ID NO: 684 - DNA, 237 bp, Erinaceus europaeus
tgagcttccctccgccctaccggcctaaaccggctctttcgacagacttataaggacctcttatcttaggacatttttttgttagggtaacttcccacgatgcatagcgatatgtaaatatggcgccgcgagtctctcctaggcgtctccccaggacgcaggcgcactgcttgttcccgcgttaacattgctgattctgggagactgctgatgacgtcagcgtccagtctacatggc

SEQ ID NO: 685 - DNA, 237 bp, Erinaceus europaeus
tgagcttccctccgccctaccggcctaaaccggctctttcaacagacttataaggacctcttatcttaggacatttttttcttagggtaacttcccatgatgcacagcgatatgtaaatatggcgccgcgagtctctcctaggcgtctccccaggacgcaggcgcactgcttgttcccgcgttaacattgctgattctgggagactgctgatgacgtcagcgtccagtctacatggc

SEQ ID NO: 686 - DNA, 258 bp, Solenodon paradoxus
tgagcttccctccgccctatcagcgtaaagaagtgcgtacaaagaatttataaggctcacatagctctagctgcttctcagttagggtgacttcccacaagccatagcgcatgtaaatataagggcgtttgttcccccgcccccgtccaggctgcagcatctctccaggacgcaggcgcactgagccttcccgcccggtcactccagacccgccattcccgggccaggttaatgacgtcacacttaagctccatggcg

SEQ ID NO: 687 - DNA, 258 bp, Solenodon paradoxus
tgagcttccctccgccctatcagcgtaaaggagtgcgtacaaagaatttataaggctcgcatagctctagctgcttcacagttagggtgacttcccacaagccatagcgcatgtaaatacaagggcgtttgttcccccgcccccgtccaggctgcagcatctctccaggacgcaggcgcactgagccttcccgcccggtcactccagacccgccattcccgggccaggttaatgacgtcacacttaagctccatggcg

SEQ ID NO: 688 - DNA, 251 bp, Scalopus aquaticus
tgagcttccctccgccctatcagcgtaaaagaatgcttagctgggatttataaggctcccagacctaaagccatagctcggttagggtgacttcccacaagacatagcgacatgcaaatatagaggggcgggcttcccctgtgccttgtaggcgtcttctcacgaaatcgcaagcgcgttgcatgttcccgccctgtcactattggccgatcttttccggcggagtctaagacgtcatcggttccatggcg

SEQ ID NO: 689 - DNA, 271 bp, Condylura cristata
tgagcttccctccgccctatcagcgcagagacaagcttagctagaatttataaggcgcccatacttgcagacatatatcggttagggtgacttcccacaagccatagcgacatgcaaatagagagggcgggcttcccctgagctttgtaggcgtcttcttacgaagtcgcgagcgcgtcgcgcgcctgttcccgcccggtcactattggcctgtcactattgtcattccgcccttcccgggcggagtctggtgactttcggttccatggcg

SEQ ID NO: 690 - DNA, 246 bp, Uropsilus gracilis
tgagcttcctccgccctccggcgtaaaggctggcttacctaccctttataaggctcccagacgtaaagccatatcagagttagggtgacttcccacaagacgtagcgacatgcaaatatagaggggcgggtttgtccagtgccctataggcgtcttctggagtcgcccgcgctttgagctcccgtactgtccctattggccgagcattccagtcgtagtctgatgacctcattcgcttccatggcg

SEQ ID NO: 691 - DNA, 229 bp, Sorex araneus
tgagcttccctccgccctaccggcgtaagacgcgccgcatcgcgtacttataaggatcccctggtcaacgatcttttacagttagggtgacttcccacagtacacggcggtattcaaatatgaagggcgtgtctagtccgggtcttaggtttgggggcggggtctggctaggcgcatgtgcagtgctggttcccgccacttccgacgtctacgtttagactccatggcg

SEQ ID NO: 692 - DNA, 285 bp, Artificial Sequence
  Description of Artificial Sequence: Synthetic polynucleotide
tgagcttccctccgccctaycrgcgtaaavsrrbkcktasmwmrrayttataaggmycycwtasythwrgmyrtwtywydgttagggtgacttcccacaakmcatagcgayatgyaaatatrrvggsgcgkgtytcycckvggtcyyhgyyywgkmggcgkcwtctyhcsargwcgcargcgcrytgmkcgccygttcccgccckgtcamymywgvyctgtcactattgtcattccsrbcwttcysggvsvmkkytratgacgtcarcryytmgkytccatggcg

SEQ ID NO: 693 - DNA, 285 bp, Artificial Sequence
  Description of Artificial Sequence: Synthetic polynucleotide
  modified_base (33)..(33): a, c, t, or g
  modified_base (45)..(45): a, c, t, or g
  modified_base (59)..(59): a, c, t, or g
  modified_base (140)..(140): a, c, t, or g
  modified_base (179)..(179): a, c, t, or g
  modified_base (194)..(194): a, c, t, or g
  modified_base (275)..(275): a, c, t, or g
tgagcttccctccgccctaycrgcstaaavvvnbkcktwsmwmrnayttataaggmycncwkabythwrgmyrywtywydgttagggtracttcccacrakvcayagcgryatgyaaatabrrvgssgykdgyyyvyccnvggtcyyhgbyywrkvkgcrksdtctyhcsargwcgcvngcgcrytgmkcgccnsttcccgcmmbgtyamymywgvystgtcactattgtcattccsvbcwttcysggvsvmkkytratgacbtcarcryyymrnytmcatggcg

SEQ ID NO: 694 - DNA, 285 bp, Artificial Sequence
  Description of Artificial Sequence: Synthetic polynucleotide
  modified_base (33)..(34): a, c, t, or g
  modified_base (45)..(45): a, c, t, or g
  modified_base (59)..(59): a, c, t, or g
  modified_base (67)..(67): a, c, t, or g
  modified_base (140)..(140): a, c, t, or g
  modified_base (168)..(168): a, c, t, or g
  modified_base (179)..(179): a, c, t, or g
  modified_base (194)..(194): a, c, t, or g
  modified_base (251)..(251): a, c, t, or g
  modified_base (275)..(275): a, c, t, or g
tgagcttccctccgccctaycrgcsyarrvvvnnbckywbvdvvnmyttataaggmbcnchkrbbynhvgmyvywkhwbdsttagggtracttcccayrrkvcryrgcgryatkyaaatabrrvgssgykdgyyyvbycnvggtcyyhgbyywrkvkgcrksdtctbnybrrrwcgcvngygcdbygmdcgccnsytcccgymmbktymmymywgvystgtcactattgtcattccsvbcwtyyyvgkvsnmkkytrrtgacbtcwrcryyymrnytmcatggcg

SEQ ID NO: 695 - DNA, 285 bp, Artificial Sequence; identical to SEQ ID NO: 694
  Description of Artificial Sequence: Synthetic polynucleotide
  modified_base (33)..(34): a, c, t, or g
  modified_base (45)..(45): a, c, t, or g
  modified_base (59)..(59): a, c, t, or g
  modified_base (67)..(67): a, c, t, or g
  modified_base (140)..(140): a, c, t, or g
  modified_base (168)..(168): a, c, t, or g
  modified_base (179)..(179): a, c, t, or g
  modified_base (194)..(194): a, c, t, or g
  modified_base (251)..(251): a, c, t, or g
  modified_base (275)..(275): a, c, t, or g

SEQ ID NO: 696 - DNA, 285 bp, Artificial Sequence; identical to SEQ ID NO: 694
  Description of Artificial Sequence: Synthetic polynucleotide
  modified_base (33)..(34): a, c, t, or g
  modified_base (45)..(45): a, c, t, or g
  modified_base (59)..(59): a, c, t, or g
  modified_base (67)..(67): a, c, t, or g
  modified_base (140)..(140): a, c, t, or g
  modified_base (168)..(168): a, c, t, or g
  modified_base (179)..(179): a, c, t, or g
  modified_base (194)..(194): a, c, t, or g
  modified_base (251)..(251): a, c, t, or g
  modified_base (275)..(275): a, c, t, or g

SEQ ID NO: 697 - DNA, 285 bp, Artificial Sequence; identical to SEQ ID NO: 694
  Description of Artificial Sequence: Synthetic polynucleotide
  modified_base (33)..(34): a, c, t, or g
  modified_base (45)..(45): a, c, t, or g
  modified_base (59)..(59): a, c, t, or g
  modified_base (67)..(67): a, c, t, or g
  modified_base (140)..(140): a, c, t, or g
  modified_base (168)..(168): a, c, t, or g
  modified_base (179)..(179): a, c, t, or g
  modified_base (194)..(194): a, c, t, or g
  modified_base (251)..(251): a, c, t, or g
  modified_base (275)..(275): a, c, t, or g

SEQ ID NO: 698 - DNA, 236 bp, Ochotona princeps
tgagcttcctccgccctatgggggaagctgggctcgatcagcctttataaagctccaaaaactcaagacatttttctgttacggtggcttcccacagtacacagcgacatgcaaatagcttgccaatgaattcgcggaccgcttcccgccccggcgcaggcgcgcggacgctgtctcccctggacgcgcgctcgcggttcccgggagctggctgatgacgttcggtctccatggcg

SEQ ID NO: 699 - DNA, 236 bp, Ochotona princeps
tgagcttcctccgccctatgggggaagctgggctcgatcagcctttataaagctccaaaaactcaagacatttttccgttacggtggcttcccacagtacacagcgacatgcaaatagcttgccaatgagttcgcggaccgcttcccgctccggcgcaggcgcgcgggcgctgtctcccctggacgcgcgctcgcggttcccgggagctggctgatgacgttcggtctccatggcg

SEQ ID NO: 700 - DNA, 237 bp, Lepus americanus
tgagcttcctccgccctacggggagtggtggatccaagcagactttataaagctccgaaggtccaaggcatctttcccttacggtggcttcccacaagacatagcgatatgcaaatttatcgatacgcgcttcagacgcccgtctcgccgcagcgcaagcgcgctgtgtgctgacgcgggggacgggccagtgcgcgattcccgggagcgggttgatgacgttcgatctccatggcg

SEQ ID NO: 701 - DNA, 237 bp, Lepus timidus
tgagcttcctccgccctatggggagtggtggatccaagcagactttataaagctccgaaggtccaaggcatctttcccttacggtggcttcccacaagacatagcgatatgcaaatctatcgatacgtgcttcagacgcgcttctcgccgcagcgcaagcgcgctgtgtgctgacgcgggggacgggccagtgcgcgattcccgggagcgggttgatgacgttcgatctccatggcg

SEQ ID NO: 702 - DNA, 236 bp, Oryctolagus cuniculus
tgagcttcctccgccctatggggagaggtggatccgaacagactttataaagctccgaaaacccaaggcatctttcccttacggtagcttcccacaagacatagcgacatgcaaatttcttgaagtatgcttcagacgcgcttctcgccacagcgcaagcgcgctgtgtgctgacgcgggaacgggccagggcgcggttcccgggagcgggttgatgacgttagatctccatggcg

SEQ ID NO: 703 - DNA, 236 bp, Oryctolagus cuniculus
tgagcttcctccgccctatggggagaggtggatccgaacagactttataaagctccgaaagcccaaggcatctttcccttacggtagcttcccacaagacatagcgacatgcaaatttcttgaagtatgcttcagacgcgcttctcgccacagcgcaagcgcgctgtgtgctgacgcgggaacgggccagggcgcggttcccgggagcgggttgatgacgttagatctccatggcg

SEQ ID NO: 704 - DNA, 233 bp, Oryctolagus cuniculus
tgagcttcctccgccctatggggagaggtgggtccgaacagactttataaagctccgaaagcccgaggcatctttcccttacggtagcttcccacaagacatagcgacatgcaaatttcttgaatgcttcagacgcgcttctcgccacagcgcaagcgcgctgtgtgctgacgcgggaacgggccagtgcgcggttcccgggagcgggttgatgacgttagatctccatggcg

SEQ ID NO: 705 - DNA, 237 bp, Sylvilagus bachmani
tgagcttcctccgccctatggggagagctgcagccagacagactttataaagctccgaaagcccaaggcatctttcccttacagtgatttcccacaaggcctagcgacatgcaaatttattgaagtaaccgtcagacgcgcttctcgccgcagcgcaagcgcgctgtgtgctgacgcgggagacgggccggcgcgcggttcccgggagcgggttgatgacgttcgatctccatggcg

SEQ ID NO: 706 - DNA, 239 bp, Artificial Sequence
  Description of Artificial Sequence: Synthetic polynucleotide
tgagcttcctccgccctatggggagagstggryccradcagactttataaagctccgaaarcccaaggcatctttcccttacggtrgcttcccacaagacatagcgacatgcaaatwtmttgahrhdkrcttcacgacgcgcttctcgccrcagcgcaagcgcgctgtgtgctgacgccsgggracgggccagygcgcggttcccgggagcgggttgatgacgttmgatctccatggcg

SEQ ID NO: 707 - DNA, 239 bp, Artificial Sequence
  Description of Artificial Sequence: Synthetic polynucleotide
  modified_base (128)..(128): a, c, t, or g
tgagcttcctccgccctatggggrrwgstggryycradcagmctttataaagctccraarryycaagrcatytttccsttacggtrgcttcccacarkacayagcgayatgcaaatwkmtygmhrhdnrvttcrcgrmscgcttcycgccvcrgcgcargcgcgctgkgygctgwckccsskgracgsgccrgbkcgcgrttcccgggagckggytgatgacgttmgrtctccatggcg

SEQ ID NO: 708 - DNA, 239 bp, Artificial Sequence
  Description of Artificial Sequence: Synthetic polynucleotide
  modified_base (128)..(128): a, c, t, or g
tgagcttcctccgccctayggggrrwgstgsrbycrrdcagmctttataaagctccraarryycragrcatytttcysttacrgtrryttcccacarkrcmyagcgayatgcaaathkmtygmhrhdnvvktcrcgrmscscktcycgcyvcrgcgcargcgcgctgkrygctgwckccsskrracgsgccrgbkcgcgrttcccgggagckggytgatgacgttmgrtctccatggcg

SEQ ID NO: 709 - DNA, 239 bp, Artificial Sequence; identical to SEQ ID NO: 708
  Description of Artificial Sequence: Synthetic polynucleotide
  modified_base (128)..(128): a, c, t, or g

SEQ ID NO: 710 - DNA, 239 bp, Artificial Sequence; identical to SEQ ID NO: 708
  Description of Artificial Sequence: Synthetic polynucleotide
  modified_base (128)..(128): a, c, t, or g

SEQ ID NO: 711 - DNA, 239 bp, Artificial Sequence; identical to SEQ ID NO: 708
  Description of Artificial Sequence: Synthetic polynucleotide
  modified_base (128)..(128): a, c, t, or g

SEQ ID NO: 712 - DNA, 263 bp, Monodelphis domestica
tgagcttccctccgccctatggtgcggggcctcaaagagagcgatatataacgctcacaaaacccgtgctatttcttacagagggtgagtatccccatgatccccggcggtatgcaaatagtagtcgcgtcagagcagagcgcagtcagccgctctctcctagcgcgggaaatctattttcttcttcagtctcggtaacgagcgcatgcgcatactgtaggtgacctacggttttgtcaggaatcggttgggagcaccatggc

SEQ ID NO: 713 - DNA, 263 bp, Monodelphis domestica; identical to SEQ ID NO: 712

SEQ ID NO: 714 - DNA, 272 bp, Sarcophilus harrisii
tgagcttccctccgccctacgtaagcctcccgcccgggggccgctatataaggctcaccaaaccagtgctacttcttacagagggtgaatatcccgtgatacttagcggcatgcaaacaagagcttacgtcagagtagagcacaaccttccagtctttcctagcgcgggaaatcccgttttcttcagaggtcgtaggtgacaggcgcatgcgccgaagccagagaatgatccgggaaggtaggcccgcctggattcggtttagagcgccatg

SEQ ID NO: 715 - DNA, 272 bp, Sarcophilus harrisii; identical to SEQ ID NO: 714

SEQ ID NO: 716 - DNA, 272 bp, Sarcophilus harrisii; identical to SEQ ID NO: 714

SEQ ID NO: 717 - DNA, 269 bp, Trichosurus vulpecula
tgagcttccccccgccctacgtggaatcccgcctaagcggctctatataaggctcgccaattccgtactctttctagcagagggcgaaaaccccatgatccttggcggcatgcaaataacagcttgcatcagagtagggcgcggcctaccagtccttcctagcgcgggaaatcccgttttcttctgcggtcgccggggacgcgcgcgtgcgccgtagccagagagcggtccgggaaggtgggccggcggggattcggttgagagcgcta

SEQ ID NO: 718 - DNA, 269 bp, Trichosurus vulpecula
tgagcttccccccgccctacgtggaatcccgcctaagcggctctatataaggctcgccaattccgtactctttctagcagagggcgaaaaccccatgatccttggcggcatgcaaataacagcttgcatcagagtagggcgcggcctaccagtccttcctagcgcgggaaatcccgttctcttctgcggtcgccggggacgcgcgcgtgcgccgtagccagagagcggtccgggaaggtgggccggcggggattcggttgagagcgcta

SEQ ID NO: 719 - DNA, 275 bp, Artificial Sequence
  Description of Artificial Sequence: Synthetic polynucleotide
  modified_base (23)..(23): a, c, t, or g
  modified_base (92)..(92): a, c, t, or g
  modified_base (125)..(125): a, c, t, or g
  modified_base (175)..(175): a, c, t, or g
  modified_base (194)..(194): a, c, t, or g
  modified_base (215)..(217): a, c, t, or g
  modified_base (234)..(239): a, c, t, or g
tgagcttcccyccgccctaygknrsvvkscckcmhrrrsrsckmtatataasgctcrcmaawycmgtrctmyttctwrcagagggygarwanycccrtgatmcyyrgcggyatgcaaayarbagntyrcrtcagagyagrgcrcrrycwdccrstcyytcctagcgcgggaaatncyrttttcttcwkmrgtcnymggkracrvgcgcrtgcgcnnnakmcwgwrrrygrycynnnnnnryrgkyybgysdggawtcggttkrgagcrcyatggc

SEQ ID NO: 720 - DNA, 275 bp, Artificial Sequence; identical to SEQ ID NO: 719
  Description of Artificial Sequence: Synthetic polynucleotide
  modified_base (23)..(23): a, c, t, or g
  modified_base (92)..(92): a, c, t, or g
  modified_base (125)..(125): a, c, t, or g
  modified_base (175)..(175): a, c, t, or g
  modified_base (194)..(194): a, c, t, or g
  modified_base (215)..(217): a, c, t, or g
  modified_base (234)..(239): a, c, t, or g

SEQ ID NO: 721 - DNA, 275 bp, Artificial Sequence
  Description of Artificial Sequence: Synthetic polynucleotide
  modified_base (23)..(23): a, c, t, or g
  modified_base (92)..(92): a, c, t, or g
  modified_base (125)..(125): a, c, t, or g
  modified_base (175)..(175): a, c, t, or g
  modified_base (194)..(194): a, c, t, or g
  modified_base (215)..(217): a, c, t, or g
  modified_base (234)..(239): a, c, t, or g
tgagcttcccyccgccctaygknrsvvkscckcmhrrrsrsckmtatataasgctcrcmaawycmgtrctmyttctwrcagagggygarwanycccrtgatmcyyrgcggyatgcaaayarbagntyrcrtcagagyagrgcrcrrycwdccrstcyytcctagcgcgggaaatncyrttytcttcwkmrgtcnymggkracrvgcgcrtgcgcnnnakmcwgwrrrygrycynnnnnnryrgkyybgysdggawtcggttkrgagcrcyatggc

SEQ ID NO: 722 - DNA, 275 bp, Artificial Sequence; identical to SEQ ID NO: 721
  Description of Artificial Sequence: Synthetic polynucleotide
  modified_base (23)..(23): a, c, t, or g
  modified_base (92)..(92): a, c, t, or g
  modified_base (125)..(125): a, c, t, or g
  modified_base (175)..(175): a, c, t, or g
  modified_base (194)..(194): a, c, t, or g
  modified_base (215)..(217): a, c, t, or g
  modified_base (234)..(239): a, c, t, or g

SEQ ID NO: 723 - DNA, 275 bp, Artificial Sequence; identical to SEQ ID NO: 721
  Description of Artificial Sequence: Synthetic polynucleotide
  modified_base (23)..(23): a, c, t, or g
  modified_base (92)..(92): a, c, t, or g
  modified_base (125)..(125): a, c, t, or g
  modified_base (175)..(175): a, c, t, or g
  modified_base (194)..(194): a, c, t, or g
  modified_base (215)..(217): a, c, t, or g
  modified_base (234)..(239): a, c, t, or g

SEQ ID NO: 724 - DNA, 275 bp, Artificial Sequence; identical to SEQ ID NO: 721
  Description of Artificial Sequence: Synthetic polynucleotide
  modified_base (23)..(23): a, c, t, or g
  modified_base (92)..(92): a, c, t, or g
  modified_base (125)..(125): a, c, t, or g
  modified_base (175)..(175): a, c, t, or g
  modified_base (194)..(194): a, c, t, or g
  modified_base (215)..(217): a, c, t, or g
  modified_base (234)..(239): a, c, t, or g

SEQ ID NO: 725 - DNA, 261 bp, Manis pentadactyla
tgagcttccctccgccctatggcggaaagcggcccgcagccgcatttataaggctctcccacctaaagccatataatggttatggtgacttcccagaatacatggcaacatgcaaatatcgtgcggtatacctcccctgtcgcgcgtaggcgtctcctcccctggacgcatgggcgccgcatgttcccgccctatgactcggggctggcgactacgggagagagctgatgacgtgaccgcgaccgctcgggttccatggcg

SEQ ID NO: 726 - DNA, 259 bp, Manis javanica
tgagcttccctccgccctatggcagaaagcagcccgccgccgcatttataaggctctcccacctaaagccatatactggttatggtgacttcccagaagacatggcaacatgcaaatatatgcggtctacttcccctgttgcgcgtaggcgtctcctcccctggacgaacgggcgcgcatgttcccgccctatgactctgggccagcgactacgggagagagctgatgacgtgaccgcgaccgctcgggctccatggcg

SEQ ID NO: 727 - DNA, 259 bp, Manis javanica
tgagcttccctccgccctatggcagaaagcagcccgccgccgcatttataaggctctcccacctaaagccatatactggttatggtgacttcccagaagacatggcaacatgcaaatatatgcggtctacttcccctgttgcgcgtaggcgtctcctcccctggacgaacgggcgcgcatgttcccgccctatgactctgggcctgcgactacgggagagagctgatgacgtgaccgcgaccgctcgggctccatggcg

SEQ ID NO: 728 - DNA, 258 bp, Phataginus tricuspis
tgagcttccctccgccctacagaaaccagcgcccccgcccgcacttataagcctctccctactaaagacatttgacgattatggtgacttcccacaatacatagctacatgcaaatacagcgcgttatgccgcccctgtggcgcgtaggcgtctcccccccggacgcgcaggcgctgcgttccctccctgtgtgactctaggccggcgactaccggagcggctgatgacgtgagcgcgaccgctcgcggtccatggcg

SEQ ID NO: 729 - DNA, 261 bp, Artificial Sequence
  Description of Artificial Sequence: Synthetic polynucleotide
  modified_base (121)..(121): a, c, t, or g
  modified_base (178)..(178): a, c, t, or g
tgagcttccctccgccctatggcagaaagcrgcccgccgccgcatttataaggctctcccacctaaagccatatamtggttatggtgacttcccagaakacatggcaacatgcaaatatantgcggtmtacytcccctgtbgcgcgtaggcgtctcctcccctggacgmacgggcgcngcatgttcccgccctatgactctgggccdgcgactacgggagagagctgatgacgtgaccgcgaccgctcgggbtccatggcg

SEQ ID NO: 730 - DNA, 261 bp, Artificial Sequence
  Description of Artificial Sequence: Synthetic polynucleotide
  modified_base (41)..(41): a, c, t, or g
  modified_base (121)..(121): a, c, t, or g
  modified_base (163)..(163): a, c, t, or g
  modified_base (178)..(178): a, c, t, or g
  modified_base (223)..(223): a, c, t, or g
tgagcttccctccgccctayrgmrrmmagcrscccssmscngcayttataagsctctcccwmctaaagmcatwtrmygrttatggtgacttcccasaakacatrgcwacatgcaaataymnygcgktmtrcykcccctgtbgcgcgtaggcgtctccyccccnggacgmryrggcgcngcrtkyycycscystrtgactckrggcydgcgactacsggagmgngctgatgacgtgascgcgaccgctcgsgbtccatggcg

SEQ ID NO: 731 - DNA, 261 bp, Artificial Sequence; identical to SEQ ID NO: 730
  Description of Artificial Sequence: Synthetic polynucleotide
  modified_base (41)..(41): a, c, t, or g
  modified_base (121)..(121): a, c, t, or g
  modified_base (163)..(163): a, c, t, or g
  modified_base (178)..(178): a, c, t, or g
  modified_base (223)..(223): a, c, t, or g

SEQ ID NO: 732 - DNA, 261 bp, Artificial Sequence; identical to SEQ ID NO: 730
  Description of Artificial Sequence: Synthetic polynucleotide
  modified_base (41)..(41): a, c, t, or g
  modified_base (121)..(121): a, c, t, or g
  modified_base (163)..(163): a, c, t, or g
  modified_base (178)..(178): a, c, t, or g
  modified_base (223)..(223): a, c, t, or g

SEQ ID NO: 733 - DNA, 261 bp, Artificial Sequence; identical to SEQ ID NO: 730
  Description of Artificial Sequence: Synthetic polynucleotide
  modified_base (41)..(41): a, c, t, or g
  modified_base (121)..(121): a, c, t, or g
  modified_base (163)..(163): a, c, t, or g
  modified_base (178)..(178): a, c, t, or g
  modified_base (223)..(223): a, c, t, or g

SEQ ID NO: 734 - DNA, 261 bp, Artificial Sequence; identical to SEQ ID NO: 730
  Description of Artificial Sequence: Synthetic polynucleotide
  modified_base (41)..(41): a, c, t, or g
  modified_base (121)..(121): a, c, t, or g
  modified_base (163)..(163): a, c, t, or g
  modified_base (178)..(178): a, c, t, or g
  modified_base (223)..(223): a, c, t, or g

SEQ ID NO: 735 - DNA, 253 bp, Equus asinus
tgagcttccctccgccctatggggaaaaacagctcacggcggcatttataagactcacagatctaaagccatttcacgaatagggtgacttcccacaatgcacagcgacatgcaaacatagcggggcgtgcctttcctgtaccctgtgggcatctctcctggacgcacgcgcgccgggtgttcccgcgctgtgactctaggcaagcgcttcctgggagagagttgatgacggcagcattcgggctccatggcg

SEQ ID NO: 736 - DNA, 253 bp, Equus asinus; identical to SEQ ID NO: 735

SEQ ID NO: 737 - DNA, 253 bp, Equus asinus; identical to SEQ ID NO: 735

SEQ ID NO: 738 - DNA, 253 bp, Equus caballus
tgagcttccctccgccctacgggggaaaacagcccatggctgcatttataagactcacagatctaaagccatttcacgaatagggtgacttcccacaatacacagcgacatgcaaacatagcggggcgtgcctttcctgtaccctgtgggcatctctcctggacgcacgcgcgccgggtgttcccgcgctgtgactctaggcaagcgcttcctgggagagagttgatgacggcagcattcgggctccatggcg

SEQ ID NO: 739 - DNA, 253 bp, Equus przewalskii
tgagcttccctccgccctacaggggaaagcagcccatggctgcatttataagactcacagatctaaagccatttcacgaatagggtgacttcccacaatacacagcgacatgcaaacatagcggggcgtgcctttcctgtaccctgtgggcatctctcctggacgcacgcgcgccgggtgttcccgcgctgtgactctaggcaagcgcttcctgggagagagttgatgacggcagcattcgggctccatggcg

SEQ ID NO: 740 - DNA, 257 bp, Dicerorhinus sumatrensis
tgagcttccctccgccctacggagcaaacaggccaccaggcagcctttataagactcacatgtctaaagacatttaacagttagggtgacttcccacagtacacagcgatatgcaaatatcgcggagcgtgcctccccagtctctggcgggtatcttctcgcctacacgcacgcgcgccgcgtgttcccgccctgtgtcgctaggcgggccattcatgggaggggggtgatgatgtcaacattcggcctccatggcg

SEQ ID NO: 741 - DNA, 257 bp, Dicerorhinus sumatrensis; identical to SEQ ID NO: 740

SEQ ID NO: 742 - DNA, 256 bp, Diceros bicornis
tgagcttccctccgccctacggagcaaacatgcaccaggcagcctttataagactcacatatctaaagacatttcacagttagggtgacttcccacaggacacagcgatatgcaaatatcgtggagcgtgcctccccagtctctggcgggcatcttctcgcctacacgcacgcgcgccgcgtgttcccgccctgtgacgctaggtgggcctttcatgggagagggttgatgacgtcaacattcggactccatggcg

SEQ ID NO: 743 - DNA, 256 bp, Ceratotherium simum
tgagcttccctccgccctacggagcaaacatgcgccaggcagcctttataagactcacatatctaaagacatttcacagttagggtgacttcccacaggacacagcgatatgcaaatatcgtggagcgtacctccccagtctctggcgggcatcttctcgcctacacgcacgcgcgccgcgtgttcccgccctgtgacgctaggtgggcctttcatgggagagggttgatgacgtcaacattcggactccatggcg

SEQ ID NO: 744 - DNA, 256 bp, Ceratotherium simum; identical to SEQ ID NO: 743

SEQ ID NO: 745 - DNA, 256 bp, Diceros bicornis
tgagcttccctccgctctacggagcaaacatgcaacaggcagcctttataagactcacatatctaaagacatttcacagttagggtgacttcccacaggacacagcgatatgcaaatatcgtggagcgtgcctccccagtctctggcgggcatcttctcgcctacacgcacgcgcgccgcgtgttcccgccctgtgacgctaggtgggcctttcatgggagagggttgatgacgtcaacattcggactccatggcg

SEQ ID NO: 746 - DNA, 256 bp, Tapirus indicus
tgagcttccctccgccctctgaagaaaggcggctctaagcagcatttataagactcacatatctgaagacatttcacagttagggtgacttcccacaagccacagcgacatgcaaatatcgcggaatgcgcttcccctgtctcctgtgggtatcttctcgcctggacgcacgcgcaccgcgtgttcccgccctgtgacgctaggcgggcgattcctgggagagggttgatgacgtcaaccctcgggctcaatggcg

SEQ ID NO: 747 - DNA, 256 bp, Tapirus terrestris
tgagcttccctccgccctctgaagaagggcggctctaagcagcatttataagactcacagatctgaagacatttcacagttagggtgacttcccacaagacacagcaacatgcaaatatcgcggaatgtgcttttcctgtctcgggtaggcatcttctcgcctggacgcacgcgcaccgcgtgttcccgccctgtgacgctaggcgggcgattcccgagggagggttgatgacgtcaacactcgggctccatggcg

SEQ ID NO: 748 - DNA, 256 bp, Artificial Sequence
  Description of Artificial Sequence: Synthetic polynucleotide
  modified_base (34)..(34): a, c, t, or g
  modified_base (156)..(158): a, c, t, or g
tgagcttccctccgccctayggrgmaaammdgcncmmggcrgcmtttataagactcacakatctaaagmcatttcacrrwtagggtgacttcccacarkrcacagcgayatgcaaayatmgyggrgcgtgcctyyccwgtmycykgygggcatctnnnckcctrsacgcacgcgcgccgsgtgttcccgcsctgtgackctaggyrrgcshttcmtgggagagrgttgatgacgkcarcattcggrctccatggcg

SEQ ID NO: 749 - DNA, 256 bp, Artificial Sequence
  Description of Artificial Sequence: Synthetic polynucleotide
  modified_base (34)..(34): a, c, t, or g
  modified_base (156)..(158): a, c, t, or g
tgagcttccctccgccctayggrgmaaavmdgcncmmggcrgcmtttataagactcacakatctaaagmcatttcacrrwtagggtgacttcccacarkrcacagcgayatgcaaayatmgyggrgcgtgcctyyccwgtmycykgygggyatctnnnckcctrsacgcacgcgcgccgsgtgttcccgcsctgtgackctaggyrrgcshttcmtgggagagrgttgatgacgkcarcattcggrctccatggcg

SEQ ID NO: 750 - DNA, 257 bp, Artificial Sequence
  Description of Artificial Sequence: Synthetic polynucleotide
  modified_base (33)..(33): a, c, t, or g
  modified_base (35)..(35): a, c, t, or g
  modified_base (157)..(159): a, c, t, or g
tgagcttccctccgccctmygrrgvaarvmdgncnchhrgcdgcmtttataagactcacakrtctraagmcatttmacrrwtagggtgacttcccacarkrcacagcgayatgcaaayatmgyggrrygtrcytyyccwgtmycykgygggyatctnnnckcctrsacgcacgcgcrccgsgtgttcccgcsctgtgwckctaggyrrgcshttcmtgggagrgrgktgatgaygkcarcaytcggvctccatggcg

SEQ ID NO: 751 - DNA, 257 bp, Artificial Sequence
  Description of Artificial Sequence: Synthetic polynucleotide
  modified_base (33)..(33): a, c, t, or g
  modified_base (35)..(35): a, c, t, or g
  modified_base (157)..(159): a, c, t, or g
tgagcttccctccgcyctmyrrrgvarrvmdgncnmhhrgcdgcmtttataagactcacakrtctraagmcatttmacrrwtagggtgacttcccacarkvcacagcrayatgcaaayatmgyggrrygyrcytyyccwgtmycbkgyrggyatctnnnckcctrsacgcacgcgcrccgsgtgttcccgcsctgtgwckctaggyrrgcshttcmygrgrgrgrgktgatgaygkcarcmytcggvctcmatggcg

SEQ ID NO: 752 - DNA, 257 bp, Artificial Sequence; identical to SEQ ID NO: 751
  Description of Artificial Sequence: Synthetic polynucleotide
  modified_base (33)..(33): a, c, t, or g
  modified_base (35)..(35): a, c, t, or g
  modified_base (157)..(159): a, c, t, or g

SEQ ID NO: 753 - DNA, 257 bp, Artificial Sequence; identical to SEQ ID NO: 751
  Description of Artificial Sequence: Synthetic polynucleotide
  modified_base (33)..(33): a, c, t, or g
  modified_base (35)..(35): a, c, t, or g
  modified_base (157)..(159): a, c, t, or g

SEQ ID NO: 754 - DNA, 231 bp, Galeopterus variegatus; identical to SEQ ID NO: 680

SEQ ID NO: 755 - DNA, 254 bp, Callithrix jacchus
tgagcttccctccgccctatgaggaaaagtagtcccacagacaacttataagactcccataccctaagacatttcacgattatggtgacttcccagaagacacagcgacatgcaaatattgcaggtcgtgtttcgcctgtccctcacagtcgtcttcctgccagggcgcacgcgcgctgggtttcccgccaactgacgctgggctcgcgattccttggagcgggttgatgacgtcagcgtttgaattccatggc

SEQ ID NO: 756 - DNA, 254 bp, Cebus imitator
tgagcttccctccgccctatggggaaggggtggcctacgcagaacttataagattcccacacctaaagacatttaacgattatggtgacttcccagaatacacagcgacatgcaaatattgcaggtcgtacctcgcctgtcccccacagtcgtcttcctgccagggcgcacgcgcgctgggtgtcccgccaactgacagtggactcgcgattccttggagcgggttgatgacgtcaaagttcgaatgccatggc

SEQ ID NO: 757 - DNA, 254 bp, Saimiri boliviensis
tgagcttccctccgccctatggggaagggtggtccttcgcagaacttataagattcccagtcccgaggacatttctagattatggtgacttcccagaatacacagcgacatgcaaatattgcaggtcgtgcctcgcctgtccctcactgtcgtcttcctgccagggcgcacgcgcgctgggtgtcccgccaactgacactgggctcgcgattccttggagcgggttgatgacgtcagcgttcgaattccatggc

SEQ ID NO: 758 - DNA, 254 bp, Callithrix jacchus
tgagcttccctccgccctatgaggaaaagtagtcccacagacaacttataagattcccataccctaagacatttcacgattatggtgacttcccagaagacacagcgacatgcaaatattgcaggtcgtgtttcgcctgtccctcacagtcgtcttcctgccagggcgcacgcgcgctgggtttcccgccaactgacgctgggctcgcgattccttggagcgggttgatgacgtcagcgtttgaattccatggc

SEQ ID NO: 759 - DNA, 252 bp, Aotus nancymaae
tgagcttccctccgccctacggggaagggtggtcctatacagaacttataagactcccatacccaaagacatttcacggttatggtgacttcccagaagacacagcgacatgcaaatattgtaggtcgtgcctcgcttgtccctcagtagtcttcctttcagagcgcacgcgcgctgggtgtcccgccaactgacactgggctcgcgattccttggagcgggttgatgacgtcagcgttcgaattccatggc

SEQ ID NO: 760 - DNA, 263 bp, Microcebus murinus
tgagcttccctccgccctatgaggaggaaccatcccacccagaatttataaagttcccaaatcggaagacatttcaccattagggtgatttcccacaacacatagcgacatgcaaatatctcagagcgtacctcccctgtcctatacgggcgtcaactccccagggcgggcgcgcgcgcgctgtttcccgcctgtgactcgggactctgcgcccgggattcctcggagcgggttgagaacgtcagctccggtgcttcatggcg

SEQ ID NO: 761 - DNA, 262 bp, Otolemur garnettii
tgagcttccctccgccctacgcctaaaagggcgcttgcacagaatttataaggttcccaaacagagacacatttcattattatggtgacttcccacaatgcacagcgccatgcaaatatgctaggacctgcctccccacacccgctaccttaaggtcgtcaactaaccagtgcgcgcgcgcactgcgcgtttcccgccggtgactcaatgcccgcgtttggtgggagctagttggtgacctcagttctggaggctcatggcg

SEQ ID NO: 762 - DNA, 257 bp, Papio anubis
tgagcttccctccgccctatggggaaaggtggtaccatacagaacttataagattcccatactcaaagacatttcacgattatggtgacttcccagaagacacagcgacatgcaaatattgtagggcgtcacaccccctgtccctcacagtcatcttcctgccagggcgcacgcgcgctgggtgttcccgcgtagtgacactgggcccgcgattccttggagcgggttgatgacgtcagcgttcgaattccatggcg

SEQ ID NO: 763 - DNA, 257 bp, Piliocolobus tephrosceles
tgagcttccctccgccctatggggaagggtgaggctactcagaacttataaggctcccatactcaaagacatttcacgtttatggtgacttcccagaagacatagcgacatgcaaatattgcagggcgtcacacccctgtctcttaacagtcatcttcctgccagggcgcacgcgcgctgggtgttcccgcgtagtgacactgagcccgcgattccttggagcgggttgatgacgtcagcgttcgaattccatggcg

SEQ ID NO: 764 - DNA, 257 bp, Colobus angolensis
tgagcttccctccgccctatggggaagggtggtcctccatagaacttataagactcccatactcaaagacatttcacgtttatggtgacttcccagaagacatagcgacatgcaaatattgcagggcgtcacaccccctgtcccttacagctctcttcctgccagggcgcacgcgcgctgggtgttcccgcgtagtgacactgggcccgcgattccttggaacgggttgatgacgtcagcgttcgaattacatggcg

SEQ ID NO: 765 - DNA, 256 bp, Nomascus leucogenys
tgagcttccctccgccctatggggaaaagtagttttttttagaccttataagattcccaaacccaaagacatttctcgtttatggtgacttcccagaagacatagcgacatgcaaatattgcagggcgccactcccctgtccctcacagccatcttcctgccagggcgcacgcgcgctgggtgttcccgcctagtgacactcggcccgcgattccttggagcgggttgatgacgtcagcgttcgaattccatggcg

SEQ ID NO: 766 - DNA, 256 bp, Gorilla gorilla
tgagcttccctccgccctatgggaaagggtggtcccacacagaacttataagactcccatatccaaagacatttcacggttatggtgatttcccagaacacatagcgacatgtaaatattgcagggcgccactccccagtccctcacagccatcttcctgccagggcgcacgcgcgctgggtgttcccgcctagtgacactgggcccgcgattccttggagcgggttgatgacgtcagcgttcgaattccatggcg

SEQ ID NO: 767 - DNA, 256 bp, Rhinopithecus bieti
tgagcttccctccgccctatggggaagggtggtcctacacagagcttataagactcccatactcaaagacatttctcgtttatggtgacttcccagaagccatagcgacatgcaaatattgcagggcgtcacacccctgtcccttacagccatcttcctgccagggcgcacgcgcgctgggtgttcccgcgtagtgacactgggcccgcgattccttggagcgggttgatgacgtcagcgttcgacttccatggcg

SEQ ID NO: 768 - DNA, 256 bp, Macaca fascicularis
tgagcttccctccgccctatggggaagggtggtcccacacagaacttataagattcccatactcaaagacatttctcgtttatggtgacttcccagaagacacagcgacatgcaaatattgtagggcgtcacacccctgtccctcacagtcatcttcctgccagggcgcacgcgcgctgggtgttcccgcgtagtgacactgggcccgcgattccttggagcgggttgatgacgtcagcgttcgaattccatggcg

SEQ ID NO: 769 - DNA, 256 bp, Propithecus coquereli
tgagcttccctccgccctatgagggaaaagggttctgcacagaatttataaggctcccaaatctaaaaacatttcaccattatggtgatttcccacaacacatagcgacatgcaaatatctcagagcgtacctcccctgtcctatacgggcgtcaactcgccatggcgcacgcgcgttgtgtgtttcccgcctgtgactctgggcccgcgattcctcccagcgggttgagtacgtcagctccggtgcttcatggcg

SEQ ID NO: 770 - DNA, 256 bp, Pan paniscus
tgagcttccctccgccctatgggaaagggtggtgccacacagaacttataagactcccatatccaaagacatttcacgtttatggtgatttcccagaacacatagcgacatgcaaatattgcagggcgccactcccctgtccctcacagccatcttcctgccagggcgcacgcgcgctgggtgttcccgcctagtgacactgggcccgcgattccttggagcgggttgatgacgtcagcgttcgaattccatggcg

SEQ ID NO: 771 - DNA, 256 bp, Homo sapiens
tgagcttccctccgccctatgggaaaaagtggtctcatacagaacttataagattcccaaatccaaagacatttcacgtttatggtgatttcccagaacacatagcgacatgcaaatattgcagggcgccactcccctgtccctcacagccatcttcctgccagggcgcacgcgcgctgggtgttcccgcctagtgacactgggcccgcgattccttggagcgggttgatgacgtcagcgttcgaattccatggcg

SEQ ID NO: 772 - DNA, 256 bp, Rhinopithecus roxellana
tgagcttccctccgccctatggggaagggtggtcctacacagagcttataagactcccatactcaaagacatttctcgtttatggtgacttcccagaagccatagcgacatgcaaatattgcagggcgtcacacccctgtcccttacagccatcttcctgccagggcgcacgcgcgctgggtgttcccgcgtagtgacactgggcccgcgattccttggagcgggttgatgacgtcagcgttcgaattccatggcg

SEQ ID NO: 773 - DNA, 256 bp, Macaca mulatta
tgagcttccctccgccctatggggaagggtgggcccacacagaacttataagattcccatactcaaagacctttctcgtttatggtgacttcccagaagacacagcgacatgcaaatattgtagggcgtcacacccctgtccctcacagtcatcttcctgccagggcgcacgcgcgctgggtgttcccgcgtagtgacactgggcccgcgattccttggagcgggttgatgacgtcagcgttcgaattccatggcg

SEQ ID NO: 774 - DNA, 256 bp, Chlorocebus sabaeus
tgagcttccctccgccctatggggaagggtggtcccttacagaacttataagattcccaaactcaaagacatttcacgtttatggtgacttcccagaagacatagcgacatgcaaatattgcagggcgtcacacccctctccctcacagtcatcttcctgccagggcgcacgcgcgctgggtgttctcgcgtagtgacactgggcccgcgattccttggagcgggttgatgacgtcagcgttcgaattccatggcg

SEQ ID NO: 775 - DNA, 256 bp, Macaca nemestrina
tgagcttccctccgccctatggggaaagccgatcccagccagaacttataagattcccatactcaaagacatttctcgtttatggtgacttcccagaagacacagcgacatgcaaatattgtagggcgtcacacccctgtccctcacagtcatcttcctgccagggcgcacgcgcgctgggtgttcccgcgtagtgacactgggcccgcgattccttggagcgggttgatgacgtcagcgttcgaattccatggcg

SEQ ID NO: 776 - DNA, 256 bp, Cercocebus atys
tgagcttccctccgccctatggggaaaggtggtcccacaccgaacttataagactcccatactcaaagacatttctcgtttatggtgacttcccagaagacacagcgacatgcaaatattgtagggcgtcacacccctgtccctcacagtcatcttcctgccagggcgcacgcgcgctgggtgttcccgcgtagtgacactgggcccgcgattccttgcagcgggttggtgacgtcagcgttcgaattccatggcg

SEQ ID NO: 777 - DNA, 256 bp, Mandrillus leucophaeus
tgagcttccctccgccctatggggaaaggtggtcccacacagaacttataagattcccatactcaaagacatttctcgtttatggtgacttcccagaagacacagcgacatgcaaatattgtagggcgtcacacccctgtccctcacagtcatcttcctgccagggcgcacgcgcgctggatgttcccgcgtagtgaccctgggcccgcgattccttggagcgggttgatgacgtcagcgttcgaattccatggcg

SEQ ID NO: 778 - DNA, 256 bp, Macaca mulatta
tgagcttccctccgccctatggggaagggtggtcccacacagaacttataagattcccatactcaaagacctttctcgtttatggtgacttcccagaagacacagcgacatgcaaatattgtagggcgtcacacccctgtccctcacagtcatcttcctgccagggcgcacgcgcgctgggtgttcccgcgtagtgacactgggcccgcgattccttggagcgggttgatgacgtcagcgttcgaattccatggcg

SEQ ID NO: 779 - DNA, 255 bp, Pongo abelii
tgagcttccctccgccctatgagaaagggtggtcccgtccagaacttataagattcccatacccaaagacatttcacgtttatggtgacttcccagaatgcatagcgacatgcaaatattgcagggcgtcactcccctgtccctcacagccatcttcctgccagggcgcccgcgcgctggtgttcccgcctagtgacactgggcccacgattccttggagcgggttgatgacgtcagcgctcgtattccatggcg

SEQ ID NO: 780 - DNA, 254 bp, Carlito syrichta
tgagcttccctccgccctacgcgagagggtgggtccacacagagcttataaggcttcacaagtaaagatatttcacggtgacggtgacttcccacaatacactgcgacatgcaaatatagccgggcgtgcctccccgatcccggaagagcgactcctagccagtgcgcacgcgcgctgcgtgttcgcgtcctaggtcgctgggcccgcggttcctgggagcgggtggtgacgtcagcggcccagcttcatggcg

SEQ ID NO: 781 - DNA, 252 bp, Eulemur flavifrons
tgagcttccctccgccctgccaggaaaagtttaaacacacaatttataaggttcccaaatctaaagccattttaccattatggtgatttcccacaacacatagcgacatgcaaatgtctcacagtgtacctcccctgtcctatacgggcgacgactcgtcagggcgcacgcgcactgtgtttcccgcctgtgattctgggcccgcgattcatctgagcgggttgataacgtcagctccggtgcttcatggcg

SEQ ID NO: 782 - DNA, 230 bp, Tupaia chinensis
tgagcttccctccgccttatgggggaagctgggtccactgagttcttataaggtttccagtcctagagcgattttaccattacggtgatttcccagcatccgtagctacatgcaaatagcgcggggcgcgtctctcaggtccctcccccgtgccctctcactgtacgtacccgcgtcctagggacgccgcgcccggggttcccggacgtcagcgttccgacgcaatggcg

SEQ ID NO: 783 - DNA, 255 bp, Pan troglodytes
gagcttccctccgccctatgggaaagggtggtgccacacagaacttataagattcccatatgcaaagacatttcacgtttatggtgatttcccagaacacatagcgacatgcaaatattgcagggcgccactcccctgtccctcactgccatcttcctgccagggcgcacgcgcgctgggtgttcccgcctagtgacactgggcccgcgattccttggagcgggttgatgacgtcagcgttcgaattccatggcg

SEQ ID NO: 784 - DNA, 256 bp, Artificial Sequence
  Description of Artificial Sequence: Synthetic polynucleotide
  modified_base (39)..(39): a, c, t, or g
tgagcttccctccgccctatgrgraarrgtggtycyayncagaacttataagrytcccawayyyaaagacatttcwcgwttatggtgayttcccagaabacayagcgacatgcaaatattgyagggcgtsmcwcccctgtccctyacrgycrtcttcctgccagggcgcacgcgcgctgggtgttcccgcstagtgacdctgggcccgcgattccttggagcgggttgatgacgtcagcgttcgaattccatggcg

SEQ ID NO: 785 - DNA, 256 bp, Artificial Sequence
  Description of Artificial Sequence: Synthetic polynucleotide
  modified_base (39)..(39): a, c, t, or g
  modified_base (185)..(185): a, c, t, or g
  modified_base (193)..(193): a, c, t, or g
tgagcttccctccgccctaygrgraarrvkrrkyyydynsagaryttataagrytcccadayyyaaagacatttcwcswttatggtgayttcccasaabmcayagcgacatgcaaatatygyaggkcgysmcwcscckgtcccwyacrgbcrtcwwcyykccagdgcgcacgcgcgctgsgtgtncccgcswnstgacdctgggcycgcgattcctbggagcgggttgrtgacgtcagckyysgwrytycatggcg

SEQ ID NO: 786 - DNA, 257 bp, Artificial Sequence
  Description of Artificial Sequence: Synthetic polynucleotide
  modified_base (39)..(39): a, c, t, or g
  modified_base (147)..(147): a, c, t, or g
  modified_base (185)..(186): a, c, t, or g
  modified_base (194)..(194): a, c, t, or g
  modified_base (219)..(219): a, c, t, or g
tgagcttccctccgccctaygrgrrarrvkrrkbyydynsagaryttataagrytcccadayyydaagacatttywcswttatggtgayttcccasaabmcayagcgacatgcaaatatykyaggkcgyvhcwcscckgtccywyanrgbcrtcwwcyykccagdgcgcvcgcgcgctgsgtgtnncccgcswnstgacdctgsgcycgcgattcctbngagcgggttgrtracgtcagckyysgwrykycatggcg

SEQ ID NO: 787 - DNA, 261 bp, Artificial Sequence
  Description of Artificial Sequence: Synthetic polynucleotide
  modified_base (24)..(24): a, c, t, or g
  modified_base (31)..(31): a, c, t, or g
  modified_base (39)..(39): a, c, t, or g
  modified_base (44)..(44): a, c, t, or g
  modified_base (57)..(57): a, c, t, or g
  modified_base (60)..(60): a, c, t, or g
  modified_base (75)..(75): a, c, t, or g
  modified_base (120)..(120): a, c, t, or g
  modified_base (135)..(136): a, c, t, or g
  modified_base (142)..(143): a, c, t, or g
  modified_base (145)..(148): a, c, t, or g
  modified_base (150)..(150): a, c, t, or g
  modified_base (152)..(153): a, c, t, or g
  modified_base (157)..(157): a, c, t, or g
  modified_base (161)..(161): a, c, t, or g
  modified_base (165)..(165): a, c, t, or g
  modified_base (180)..(180): a, c, t, or g
  modified_base (186)..(187): a, c, t, or g
  modified_base (189)..(189): a, c, t, or g
  modified_base (193)..(195): a, c, t, or g
  modified_base (198)..(198): a, c, t, or g
  modified_base (206)..(208): a, c, t, or g
  modified_base (223)..(223): a, c, t, or g
  modified_base (226)..(226): a, c, t, or g
  modified_base (232)..(232): a, c, t, or g
  modified_base (234)..(234): a, c, t, or g
  modified_base (236)..(236): a, c, t, or g
  modified_base (246)..(246): a, c, t, or g
  modified_base (250)..(253): a, c, t, or g
tgagcttccctccgccctaysvsnrarrvbnvkbhydbnbvswnyttataagrytyncanwybbdravmbmtttnwhsdttayggtgayttcccasaabvcayagcgacatgcaaatatnkyrgrkcgyvhywcnnchdstnnynnnndnbnnwcdncyhnycvndgcgcvcgcgcrctnbryktnncncgcnnnsdnskgacdcnnngcycgsgrttcvtbnsancgrgtngnknacgtcarhknybsnnnnycatggcg

SEQ ID NO: 788 - DNA, 273 bp, Artificial Sequence
  Description of Artificial Sequence: Synthetic polynucleotide
  modified_base (24)..(24): a, c, t, or g
  modified_base (29)..(29): a, c, t, or g
  modified_base (31)..(32): a, c, t, or g
  modified_base (34)..(34): a, c, t, or g
  modified_base (37)..(37): a, c, t, or g
  modified_base (39)..(39): a, c, t, or g
  modified_base (44)..(44): a, c, t, or g
  modified_base (57)..(57): a, c, t, or g
  modified_base (60)..(60): a, c, t, or g
  modified_base (63)..(63): a, c, t, or g
  modified_base (75)..(75): a, c, t, or g
  modified_base (117)..(117): a, c, t, or g
  modified_base (120)..(120): a, c, t, or g
  modified_base (131)..(141): a, c, t, or g
  modified_base (146)..(168): a, c, t, or g
  modified_base (171)..(172): a, c, t, or g
  modified_base (186)..(187): a, c, t, or g
  modified_base (192)..(195): a, c, t, or g
  modified_base (199)..(201): a, c, t, or g
  modified_base (204)..(210): a, c, t, or g
  modified_base (212)..(212): a, c, t, or g
  modified_base (216)..(216): a, c, t, or g
  modified_base (218)..(220): a, c, t, or g
  modified_base (233)..(238): a, c, t, or g
  modified_base (241)..(241): a, c, t, or g
  modified_base (243)..(248): a, c, t, or g
  modified_base (257)..(265): a, c, t, or g
tgagcttccctccgccytrysvsnvrrrnbnnbnhhnbnbvswnyttataarrytyncanhhnbdrrvmbmtttnwhbdtkabggtgayttcccabmabvcrywgckmcatgyaaanrknbhvsrdysyvnnnnnnnnnnnchdvnnnnnnnnnnnnnnnnnnnnnnncvnngygsvckckcryknnvyktnnnncgcnnnsdnnnnnnnsngwynsnnnrcycrsgdttsvnnnnnnckngnnnnnnacstsarhnnnnnnnnnhmatggcg

SEQ ID NO: 789 - DNA, 273 bp, Artificial Sequence; identical to SEQ ID NO: 788
  Description of Artificial Sequence: Synthetic polynucleotide
  modified_base (24)..(24): a, c, t, or g
  modified_base (29)..(29): a, c, t, or g
  modified_base (31)..(32): a, c, t, or g
  modified_base (34)..(34): a, c, t, or g
  modified_base (37)..(37): a, c, t, or g
  modified_base (39)..(39): a, c, t, or g
  modified_base (44)..(44): a, c, t, or g
  modified_base (57)..(57): a, c, t, or g
  modified_base (60)..(60): a, c, t, or g
  modified_base (63)..(63): a, c, t, or g
  modified_base (75)..(75): a, c, t, or g
  modified_base (117)..(117): a, c, t, or g
  modified_base (120)..(120): a, c, t, or g
  modified_base (131)..(141): a, c, t, or g
  modified_base (146)..(168): a, c, t, or g
  modified_base (171)..(172): a, c, t, or g
  modified_base (186)..(187): a, c, t, or g
  modified_base (192)..(195): a, c, t, or g
  modified_base (199)..(201): a, c, t, or g
  modified_base (204)..(210): a, c, t, or g
  modified_base (212)..(212): a, c, t, or g
  modified_base (216)..(216): a, c, t, or g
  modified_base (218)..(220): a, c, t, or g
  modified_base (233)..(238): a, c, t, or g
  modified_base (241)..(241): a, c, t, or g
  modified_base (243)..(248): a, c, t, or g
  modified_base (257)..(265): a, c, t, or g

SEQ ID NO: 790 - DNA, 201 bp, Mus musculus
tgagcttcctccgcccactttcaggatgtagaccggccgccactataaggctcgaaagaggaataaatttttcgtttagggtgatttcccacaaagcacagcgcgtaatttgcatgcgctctaccccaggctcctgtgctagacaagaagcccgcgcatccgggcaagggatgatgacgtcgtccttcaagagcgatggcg

SEQ ID NO: 791 - DNA, 201 bp, Mus musculus; identical to SEQ ID NO: 790

SEQ ID NO: 792 - DNA, 201 bp, Mus musculus; identical to SEQ ID NO: 790

SEQ ID NO: 793 - DNA, 201 bp, Mus musculus; identical to SEQ ID NO: 790

SEQ ID NO: 794 - DNA, 201 bp, Mus musculus; identical to SEQ ID NO: 790

SEQ ID NO: 795 - DNA, 201 bp, Mus musculus; identical to SEQ ID NO: 790

SEQ ID NO: 796 - DNA, 201 bp, Mus musculus
tgagcttcctccgcccacttttagggtgtagaccggccgccactataaggctcgaaagaggaataaattttacgtttagggtgatttcccacaaagcacagcgcgtaatttgcatgtgctctatcccaggctcctgtgccagacaagaagcccgcgcatccgggcaagggatgatgacgtcgtccttcaagagcgatggcg

SEQ ID NO: 797 - DNA, 201 bp, Mus musculus; identical to SEQ ID NO: 796

SEQ ID NO: 798 - DNA, 201 bp, Mus musculus
tgagcttcctccgcccactttcagggtgtagaccggccgccactataaggctcgaaagaggaataaatttttcgtttagggtgatttcccacaaagcacagcgcgtaatttgcatgtgctctatcccaggctcctgtgccagacaagaatcccgcgcatccgggcaagggatgatgacgtcgtccttcaagagcgatggcg

SEQ ID NO: 799 - DNA, 201 bp, Mus spretus
tgagcttcctccgcccacttccagtgtgtagaccggccgccactataaggttcgaaagaggaataaatttttcgtttagggtgatttcccacaaagcacagcgcgtaatttgcatgtgctctaccccgggctcctgtgctagacaagaagcccgcgcatccgggcaagggatgatgacgtcgtccttcaagagcgatggcg

SEQ ID NO: 800 - DNA, 201 bp, Mus spicilegus
tgagcttcctccgcccactttcagtgtgtagaccggccgccactataaggttcgaaagaggaataaattttacatttagggtgatttcccacaaagcacagcgcgtaatttgcatgtgctctaccccaggctcctgtgctagacaagaagcccgcgcatccgggcaagggatgatgacgtcgtccttcaagagcgatggcg

SEQ ID NO: 801 - DNA, 201 bp, Mus spicilegus; identical to SEQ ID NO: 800

SEQ ID NO: 802 - DNA, 201 bp, Mus caroli
tgagcttcctccgcccacttggagggtggagaccggccgccactataaggctcgaaagaggaataaattttacgtttagggtgatttcccacaaagcacagcgcgtaatttgcatgtgctctatcccaggctccagtgccagacaagaagcccgcgcatccgggcaagggatgatgacgtcgtccttcaagagcgatggcg

SEQ ID NO: 803 - DNA, 201 bp, Mus caroli; identical to SEQ ID NO: 802

SEQ ID NO: 804 - DNA, 201 bp, Mus minutoides
tgagcttcctccgcccacttggagggtgtacaccgggcgccactataaggttcgaaagaggaataaatttctcgcttacggtgacttcccacaaagcacagcgcgtaatttgcatgatcttgatcccaggcttctgttccagacaagaagcctgcgcatccgggcaagggatggtgacgtcgtccttcaagcgcgatggcg

SEQ ID NO: 805 - DNA, 201 bp, Mus minutoides; identical to SEQ ID NO: 804

SEQ ID NO: 806 - DNA, 201 bp, Mus minutoides
tgagcttcctccgcccacttggagggtgtacaccgggcgccactataaggttcgaaagatgaataaatttctcgcttacggtgacttcccacaaagcacagcgcgtaatttgcatgatcttgatcccaggcttctgttccagacaagaagcctgcgcgtccgggcaagggatggtgacgtcgtccttcaagcgcgatggcg

SEQ ID NO: 807 - DNA, 208 bp, Mus Pahari
tgagcttcctccgcccacttgaaggctgtagaccggccgccactataaggctcgaaagaggaataagtttttcgcttacggtgacttcccacaaagcacagcgcgtaatttgcatgtactctatcccaggcttcctgttccagactagaagcccgcgcatccgggcaagggacgatgacatcatccccatccctccagcgcgatggcg

SEQ ID NO: 808 - DNA, 208 bp, Mus Pahari; identical to SEQ ID NO: 807

SEQ ID NO: 809 - DNA, 201 bp, Rattus rattus
tgagcttcccccgcccacttggaaggtggagacctgccgccataataagactccaaaagagagtgaatttaacacttgcggtgacttcccacaaagcacagcgtgtaatttgcatgcgctctagcccaggctccagctccgaacgagaagcccgcgcatcccggcaaaggatgatgacgtcgtccttcaagcgctatggcg

SEQ ID NO: 810 - DNA, 201 bp, Rattus rattus; identical to SEQ ID NO: 809

SEQ ID NO: 811 - DNA, 201 bp, Rattus norvegicus
tgagcttcccccgcccactaggagtgtgaagacctgccgccataataagactccaaaagacagtgaatttaacacttacggtgacttcccacaaagcacagcgtgtaatttgcatgcgctctagcccaggctccagctccggaccagaagcccgcgcatcccggcaaagggtgatgacgtcgtccttcaagcgctatggcg

SEQ ID NO: 812 - DNA, 201 bp, Rattus norvegicus; identical to SEQ ID NO: 811

SEQ ID NO: 813 - DNA, 200 bp, Apodemus sylvaticus
tgagcttcctccgcccacctgagccggtgtggtgggcaactaatataagactccaacatggaataaattttacgcttatggtgatttcccacaaagcacagcgcacaatttgcatgtaatctatcccagttcctactctaaacctggagcccgcgcatccgggcaaggggtgatgacgtcgtccctccagcgcgatggcg

SEQ ID NO: 814 - DNA, 238 bp, Apodemus speciosus
tgagcttcctccgcccacttgcagcgtggaggtcgrcactaatataagcctccaaagcggaataaattttacgctcatggtgacttcccacaaagcacagcgcataatttgcatgtgtccaatcctggttcctgctccagacataatttgcatgtgccctatcctggttcctgctccagacaagaagcccgcgcctccgggcaaggagtgatgacgtcgtccctccagcgcgatggcg

SEQ ID NO: 815 - DNA, 200 bp, Grammomys surdaster
tgagcttcctccgcccacttacacggcggcgatcggcgaaacttataagagtcgaaggcggcataaagtttaagcttatggtgacttcccacaaagcacagcgcgtaatttgcatgtactttatcccaggctctttctcccgaccagtagcctcacatccgggcaaggggtgatgacgtcgtctatcaagcgcgatggcg

SEQ ID NO: 816 - DNA, 200 bp, Arvicanthis niloticus
tgagcttcctccgcccatttttcgtttcgaggttggcgaaaattataagactcgaaagcggcacaaagtttaagcttatggtgatttcccacaaagcacagcgcgtaatttgcatgtgttttatcccaggctcttctccagaccaataacctgcacatccgggcaaggggtgatgacgtcgtccatcaagcgctatggcg

SEQ ID NO: 817 - DNA, 200 bp, Mastomys coucha
tgagcttcctccgcccactgcgaaacacatgagcggcaatcattataagcctccaaagcggaaaatctttttcgattatggtgacttcccacaaagcatagcgctaatttgcatgcgctttatctcagtctcctgctacaggcaagaagcccgcgcatccgggcaagaaatgatgacgtcgtccctcaagcgcgatggcg

SEQ ID NO: 818 - DNA, 204 bp, Cricetulus griseus
tgagcttcctccgcccactacagcctggtgaatggcgggctttataaggctccggagagaaagcgctttctcagttatggtggtttcccacaaggcacagcgcacactttatttgcatgcgatctagcgcaggctcccgctccagacaagaagcccgcgcttttcggctgcttatgatgacgtcgggcctcaagcgccatggcg

SEQ ID NO: 819 - DNA, 204 bp, Cricetulus griseus; identical to SEQ ID NO: 818

SEQ ID NO: 820 - DNA, 204 bp, Cricetulus griseus; identical to SEQ ID NO: 818

SEQ ID NO: 821 - DNA, 204 bp, Cricetulus griseus; identical to SEQ ID NO: 818

SEQ ID NO: 822 - DNA, 204 bp, Cricetulus griseus; identical to SEQ ID NO: 818

SEQ ID NO: 823 - DNA, 212 bp, Mesocricetus auratus
tgagcttcctccgcccggcgtggcccggcggcgggcgaactatataagcctccgcggaggaagcgctttctcggttagggtggtttcccacaagcctcagcgcacagcctctttgcatacgctcccgccgcccccgggctcctccctctccgcacaagaagcccgcgcatttcgactgcggatgatgacgtcgggcctcgagcgccatggcg

SEQ ID NO: 824 - DNA, 202 bp, Phodopus sungorus
tgagcttcccccgcccacgacgccggtggggagggcgaaccttataagcgtcggaagagaaagctattttgcagttatggtggtttcccacaaggcacagcgtacagttatttgcatacgctccagcccgctcccgctccggactagaaagcccgcgaatttcggctgtggatgatgacgtcggacctcaagcgccatggcg

SEQ ID NO: 825 - DNA, 213 bp, Peromyscus maniculatus
tgagcttcccccgcccgccagagggcggtggccggcgagcttaataagcctcggaggcgggacgcctgttacagtgacggtggtttcccacaaagcacagcgcggcggtcttgatttgcatgcgcctttatgcccgcctcccgctccggagaagaagcccgcgcatcccggctgggctgggggtgatgacgtcagggctcgagcgccatggcg

SEQ ID NO: 826 - DNA, 213 bp, Peromyscus maniculatus
tgagcttcccccgcccgccggagggcggtgggcggcgagcttaataagcctcggaggcgggacgcctgttacagtgacggtggtttcccacaaagcacggcgcggcggtcttgatttgcatgcgcctttatgcccgcctcccgctccggagaagaagcccgcgcatcccggctgggctgggggtgatgacgtcagggctcgagcgccatggcg

SEQ ID NO: 827 - DNA, 213 bp, Peromyscus polionotus
tgagcttcccccgcccgccgcaaagcggtggccggcgagcttaataagcctcggaggcgggacgcctgttacagtgacggtggtttcccacaaggcacggcgcggcggcctcgatttgcatgcgcttttatgcccgcctcccgctccggagaagaagcccgcgcatcccggctgggctgggggtgatgacgtcagggctcgagcgccatggcg

SEQ ID NO: 828 - DNA, 213 bp, Peromyscus leucopus
tgagcttcccccgcccgccgcaaagcggtggccggcgagcttaataagcctcggaagcgggacgcctgttacagtgacggtggtttcccacaaagcacggcgcggcggtcttgatttgcatgcgcctttatgcccgcctcccgctccggagaagaagcccgcatatcccggctgggctgggggtgatgacgtcaggactcgagcgccatggcg

SEQ ID NO: 829 - DNA, 208 bp, Peromyscus californicus
tgagcttcccccgcccaccggagagcggcggccggcgaacttaataggccgtgggagcggaacgcacttttcagtgatggtggtttcccacgaggcacagcgcggcggcccttatttgcatgcgcttctattcccgcctcccgccccagagaagaagcccgcgcatcccggctggggatgatgacgtcagggctcgagcgccatggcg

SEQ ID NO: 830 - DNA, 205 bp, Onychomys torridus
tgagcttcccccgcccaccgaggtggtctggctggcgaatttaataaggctccgaagagcaatgcattttacagtgacggtggtttcccacaaggcacggcgcggcctttatttgcatgcgcttctgttcccgcctcccgctccaaacaagaagcccgcgcatcccggctggggatgatgacgtcagggctcgagcgccatggcg

SEQ ID NO: 831 - DNA, 205 bp, Peromyscus attwateri
tgagcttcccccgcccgccggaagagagtggccggcgagcttaataagcctcccaagcggaccgcattttacaatgatggtggtttcccacaaggcacagcgcggtctttatttgcatgcgcttctattcccgcctcccgctcccgagaagcagcccgcgcatcccggctggcgatgatgacaccagggctcgagcgccatggcg

SEQ ID NO: 832 - DNA, 202 bp, Sigmodon hispidus
tgagcttcccccgcccggggggctgttcttggtgaatagccttataaagctgcaaagcgattcgtattttacggttatggtggtttcccataagatattgcgcgccgtttatttgcatggctcttagccccacctcccgccacaaactggaagtcggcgcttctcggctgtgcatgatgacgtcagagttcgagcgccatgg

SEQ ID NO: 833 - DNA, 201 bp, Acomys cahirinus
tgagcttcctccgcccagcggcgaagggcgggcagccacctttataagactccagagccgaatgcatttcacagttgtggtggtttcccatgaggcacagcgcgctatttgcatgcgctttagcccgggctccggcaatggaataagaaatcccgcgcatccgggtgagggatgacgacgtcaccctcaagcgctatggcg

SEQ ID NO: 834 - DNA, 201 bp, Acomys russatus
tgagcttcctccgcccagcggcgagaggtggtcagccacgtttataagactccagagccgagtgcatttctcagttgtggtggcttcccatgaggcacagcgcgctatttgcatgcgctctagcccgggctccggctctggaataaaaaatcccgcgcatccgggtgagggatgacgacgtcaccctcaagcgctatggcg

SEQ ID NO: 835 - DNA, 193 bp, Psammomys obesus
tgagcttcccccgcccgccgaagaagtgggggagaccgaacttataagacacagaaggcaacaaacttttcagttgcggtggcttcccacaaggcacagcgctttatttgcatgcgcgctaaccggggcccctactaaaaagcccgcgcatgcgcggcgcgggatgatgacgtcagccctcgagcgcgatggc

SEQ ID NO: 836 - DNA, 194 bp, Rhombomys opimus
tgagcttcccccgcccgccggagtcgtgggggcgagcggctttataagactcagaagggaacaaacttttcagatgcggtggcttcccacaaggcacagcgctttatttgcatgcgcgctaaccggggcccctactaaaaagcccgcgtatgtccggcgcgggatgatgacgtcggcccccgagcgcgatggcg

SEQ ID NO: 837 - DNA, 194 bp, Meriones unguiculatus
tgagcttcccccgcccgcggaggctctcggagagcgcggctttataagactcagaagggaacaaatttttcagttgcggtggcttcccacaaggcacagcgctcatttgcatgcgctctaacctggggcccttactaaaaagcccgcgcgtgtccggcgcgggatgatgacgtcagcccccgagcgcgatggcg

SEQ ID NO: 838 - DNA, 194 bp, Meriones unguiculatus; identical to SEQ ID NO: 837

SEQ ID NO: 839 - DNA, 194 bp, Meriones unguiculatus; identical to SEQ ID NO: 837

SEQ ID NO: 840 - DNA, 194 bp, Meriones unguiculatus; identical to SEQ ID NO: 837

SEQ ID NO: 841 - DNA, 194 bp, Meriones unguiculatus; identical to SEQ ID NO: 837

SEQ ID NO: 842 - DNA, 200 bp, Cricetomys gambianus
tgagcttcctccacccgccgggcagcttcggctggagcgccttataagactccaaagccaggtccatctatgagttagggtgttttcccacaaggcatagcgtgctgctgatttgcatgtgcccgagccagtgctcccgatcttgccagcccgcgcttcccggcgaggggatgatgacgtcatcctcaagcgcgatggcg

SEQ ID NO: 843 - DNA, 225 bp, Microtus agrestis
tgagcttcctccgcccgccgagaaggcggggcggcggcgctaaaaggctccggggcggcccggacttataagttacggtggcttcccaggaggcgcagcgccgcacatttgcatggccccaccccagacgggaagcccacgccgcttatttgcgtgtccccgccccagacgggaagcccgcgctgctcggctgcggtggtgacgtcggcctctcgcgccatggcg

SEQ ID NO: 844 - DNA, 225 bp, Microtus agrestis; identical to SEQ ID NO: 843

SEQ ID NO: 845 - DNA, 225 bp, Microtus agrestis
tgagcttcctccgcccgccgagaaggcgaggcggcggcgctaaaaggctccggggcggcccggacttataagttacggtggcttcccaggaggcgcagcgccgcacatttgcatggccccaccccagacgggaagcccacgccgcttatttgcgtgtccccgccccagacgggaagcccgcgctgctcggctgcggtggtgacgtcggcctctcgcgccatggcg

SEQ ID NO: 846 - DNA, 225 bp, Microtus oeconomus
tgagcttcctccgcccgccataaaaggcggggcggcagcgctaaaaggctccggggccgccgggacttcacagttacggtggcttcccacgaggcgcagcgctgtcatttgcatggccccgccccagacaggaagcccgcgctgctcatttgcgtgtccccgccccagacgggaagcccgcgctgcacggccgcggtggtgacgtcggcctctcgcgccatggcg

SEQ ID NO: 847 - DNA, 224 bp, Microtus fortis
tgagcttcctccgcccgccgggaaggcggggcggcggcgctaaaaggctccggggccgcccggacttcacagttacggtggcttcccacgaggcgcagcgctgtcatttgcatggccccgccccagacgggaagcccgcgctgctcatttgcgtggccccgccccagacgggaagcccgcgctgctcggccgcggtggtgacgtcggcctctcgcgccatggcg

SEQ ID NO: 848 - DNA, 224 bp, Microtus arvalis
tgagcttcctccgcccgccgggaaagcggggcggcggcgctaaaagagtccagggcggcccggacttatcagttacggtggcttcccgcgaggcgcagcgccgctcatttgcatggccccaccccagagggaagcccgcgccgctcatttgcatggccccgccccggacgggaagcccgcgctgcctggccgcggtggtgacgtcggcctctcgcgccatggcg

SEQ ID NO: 849 - DNA, 248 bp, Marmota marmota
tgagcttccctccgccctatgaaaggggctcgtcacaagcagagtttataaggctcccatgtgtacagccatttctcggtcatggtaactacccacaacacacagcgatatgcaaatatagcagagagtgtcttcccgcgcgcgcctggtcgtcttcgcgccggcgcgctgcgtggagcggaactatgacagagaccctgcgattcctgggagctggctgatgacgtcagtgtctaacctccatggcg

SEQ ID NO: 850 - DNA, 248 bp, Marmota marmota; identical to SEQ ID NO: 849

SEQ ID NO: 851 - DNA, 248 bp, Marmota himalayana
tgagcttccctccgccctatgaaaggggctcatcacaagcagagtttataaggctcccatgtgtacagccatttctcggtcatggtaactacccacaacacacagcgatatgcaaatatagcagagagtgtcttcccgcgcgcgcctggtcgtcttcgcgccggcgcgctgcgtggagcggaactatgacagagaccctacgattcctgggagctggctgatgacgtcagtgtctaacctccatggcg

SEQ ID NO: 852 - DNA, 248 bp, Marmota monax
tgagcttccctccgccctatgaaaagaactcatcacaagcagagtttataaggctcccatgtgaagagccatttctcggtcatggtaactacccacaacacacagcgatatgcaaatatagcagagagtgtcttcccgcgcgcgcctggtcgtcttcgcgccggcgcgctgcgtggagcggaactatgacagagaccctgcgattcctgggagctggctgatgacgtcagtgtctaacctccatggcg

SEQ ID NO: 853 - DNA, 248 bp, Marmota monax; identical to SEQ ID NO: 852

SEQ ID NO: 854 - DNA, 247 bp, Marmota flaviventris
tgagcttccctccgccctgtgaaaggaactcatcacaagcagagtttataaggctcccatgtgtacagccatttctcggtcatggtaactacccacaacacacagcgatatgcaaatatagcagagagtgtcttcccgcgcgcgcctggtcgtcttcgcgcccgcgcgctgcgtggagcggaactgtgacagagaccctgcgattcctgggagctggctgatgacgtcagtgtctaacctccatggc

SEQ ID NO: 855 - DNA, 248 bp, Spermophilus dauricus
tgagcttccctccgccctatgaaagggactcctctcaagcagagtttataaggctcccatgtgtacagccatttctcggtcatggtaactacccacaacacacagcgatatgcaaatatagcagagagtgtcttcccgcgcgcgcctggtcgtctcggcgccggcgcgctgcgtggggcggaactgtgacagagaccctgcgattcctggtagctggctgatgacatcagtgtctaacctccatggcg

SEQ ID NO: 856 - DNA, 248 bp, Ictidomys tridecemlineatus
tgagcttccctccgccctatgaaagggactccgcacaagcagagtttataaggctcccatctgtacagccatttctcggtcatggtaactacccacaacacacagcgatatgcaaatatagcagagcgtgtcttcccgcgcgcgcctggtcgtctcggcgccggcgcgctgcgtggggcggaactgtgacagagaccctgcgattcctgggagctggctgatgacatcagtgtctaacctccatggcg

SEQ ID NO: 857 - DNA, 248 bp, Ictidomys tridecemlineatus; identical to SEQ ID NO: 856

SEQ ID NO: 858 - DNA, 248 bp, Cynomys gunnisoni
tgagcttccctccgccctatgaaagagactcctctcaagcagagtttataaggctcccgtgtgtacagccatttctcggtcatggtaactacccacaatacacagcgatatgcaaatatagcagagagtgtcttctcgcgcgcgcctggtcttctcggcgccggcgcgctgcgtggggcggaactgtgacagagaccctgcgattcctgggagctggctgatgacgtcagtgtctaacctgcatggcg

SEQ ID NO: 859 - DNA, 248 bp, Urocitellus parryii
tgagcttccctccgccctatgaaagggaagctgctcaagcagagtttataaggctcccatgtgtacagccatttctcggtcatggtaactacccacaacacacagcgatatgcaaatatagcagagagtgtcttcccgcgcgcgcctggtcgtctctgcgccggcgcgctgcgtggagcggaactgtgacagagaccctgcgattcctgggagctggctgatgacatcagtgtctaacctccatggcg

SEQ ID NO: 860 - DNA, 254 bp, Sciurus carolinensis
tgagcttccctccgccctatgagggaaggtaaggtcaagcagaacttataaggctcccaaatgtacagacatttatcggtcatggtaactacccacaacacacagcgatatgcaaatatagcagagcgtgcctcctgcacgggccggtcgtcttctcgccggagcgcaggcgcgctgcgtggtgggggactgtgaccctgagcctgcgattcctgggagcgggctgatgacgtcagcgtctgggctccatggcg

SEQ ID NO: 861 - DNA, 254 bp, Sciurus carolinensis; identical to SEQ ID NO: 860

SEQ ID NO: 862 - DNA, 254 bp, Sciurus vulgaris
tgagcttccctccgccctatgagggaagatgagctcgagcagaacttataaggctcccaaatgtacagacatttatcggtcatggtaactacccacaacacacagcgatatgcaaatatagcagagcgtgcctcctgcacgggccggtcgtcttctcgccggagcgcaggcgcgctgcgtggtgcgggactgtgaccctgagcctgcgattcctgggagcggactgatgacgtcagcgtctgagctccatggcg

SEQ ID NO: 863 - DNA, 254 bp, Xerus inauris
tgagcttccctccgccctatgagacaaacgaatctcacgcagaacttataaggctctcatatttacagacatttcttggtcatggtaactacccacaatacatagcgatatgcaaatatagcagagtattcctccccgctcgcgtccggtcaacttctcgcctgagcgcaggcgcgctgtgtagtcggtgactaaacttgagcctgctattcctgggagcgggctgatgacatcagcatctaacctccatggcg

SEQ ID NO: 864 - DNA, 257 bp, Aplodontia rufa
tgagcttccctccgccctatgaaacgaaaaacgctggagcagaacttataaggatcccgtatctacagatatttcacgattatggtgacgacccacaacacacagcgatatgcaaatatcacggggtgtgctttccttctctcgtccggtcagcgtctcacccgggcgcaggcgcactgagtggtccagggcctgtgaccctgagctagggattcctgggagcaagttggtgacgtcagctttagacgtcaatggcg

SEQ ID NO: 865 - DNA, 254 bp, Pedetes capensis
tgagcttccctccgccctatagaagaaagcgaccttgggcaggacttataaggctcccaggagtcaagacattttttgctcatggtgacttcccacaacgcaaagcgtcatgcaaatattattggtgcgtttctttgttccagactactggacttctagccggggcgcacgcgcgctgcgtggtgcagcgtgtgacccggaacccgcgattattgggagcgagttaatgacgtcagcgtttgaacttcatggcg

SEQ ID NO: 866 - DNA, 238 bp, Muscardinus avellanarius
tgagcttccctccgccctacgtgaaagccggctgccgggcagcccttataaggctctcgtacctagagacatttccagatcatggtgactacccataacgcacagcgacatgcaaatttcatgtaaagcgcctccctctgctcctcccacgcctctgtcgagccacagcgttcccgccacagcgttcccgcggtccccgcgagcgggtggatgacgtcagcacctggacgccatggcg

SEQ ID NO: 867 - DNA, 245 bp, Glis glis
tgagcttccctccgccctatggggaaagctgggcgtgacgagcgcttataaggctctcgtacctaaagacatttcacggtcatggtgactacccacaacgcacagcgacatgcaaatttcgtggagtgtgcctccctcctctagtaccgcgtcctctcttccgggcgcacgcgacgcgttcccgccaccgcgcacgcgtggttcctgggagcgggctggtgacgtcatcactggacgccatggcg

SEQ ID NO: 868 - DNA, 264 bp, Graphiurus murinus
tgagcttccctccgccctatggggaaagctgggctcaagccgagcttataaggctctcgtaccgaaggacatttcacggtcatggtgactacccacaacacacagcgatatgcaaatctcgtagcgtgtgcttcccagcgcgtgtcctgcgtcttttctctcccgggcgcacgcgcgcacgcgcgcacgcgaagcgttcccgccacagcgcccccgcggttcctgggagcgggttgatgacgtcagcatttgtacgccatggcg

SEQ ID NO: 869 - DNA, 237 bp, Tympanoctomys barrerae
tgagcttccctccaccctatgaaataaaccagccacaaacggaaactataagaggtccaaacctcagtgtactctatggttagggtgactgcccacaatacatagcgatatgcagatttcctccccaatccggcccgccgggccctccctagagcgcatgcgctgcaggtccgcggcagagcactgggcgggcgatccggggagcgggttgatgacgtcagcttttgaacaccatgg

SEQ ID NO: 870 - DNA, 236 bp, Octomys mimax
tgagcttccctccaccctatgaaagaatctagccacaaccggaaactataagaggtccaaagctcagtgtactctatgattagggtgacttcccacaatacatagcgatatgcagatttcctcagtctatcccgctgggccctccctagagcgcatacgctgcaggtctacggccgagcactgggcgggcgatcccgggagcgagttgatgacgtcagcgtttgaactccatggcg

SEQ ID NO: 871 - DNA, 238 bp, Octodon degus
tgagcttccctccaccctatgaaggaagttagtcacaaacgcaaattataagaggtccaaagctcagtgtactctatggttagggtgacttcccacaatacatagcgatatgcagatttcttccccagtctggcccgctgggccctccctagagcgcatgcgctgcaagtccacggcggagcaccgggcgggcgatcccggagcgggttgatgacgtcagcgtttgaactccatggcg

SEQ ID NO: 872 - DNA, 241 bp, Ctenomys sociabilis
tgagcttccctccaccctatgaaacggactaattacaaacggaacctataagaggtccaaagcgcagtgtactttatgatcagggtgacttcccacaatacatagcgatatgtagatttcttccccgatgtgggccggccgggtcctccctagagcgcatgcgccgcagatccactgcaaaggactggtcggccgattccctggagcgggttgatgacattagcatttgaactccatggcg

SEQ ID NO: 873 - DNA, 249 bp, Dolichotis patagonum
tgagcttccctccgccctataaacaaaaaggtttcaaagctacgcttataaggctcccaaatgtcagtatattttttggtcacggcgacttcccacaatgcgtagcgatatgtagatattgcaggaatacctcccagttctggtcccgttagctctttgctaggacgcacgcgctgcaggttcccagcctgtgattgggccagcgattccgggagcgagttgatgacgtcagcgtttgaactccatggc

SEQ ID NO: 874 - DNA, 250 bp, Cavia tschudii
tgagcttccctccgccctatgagaaagaaaggctcaaacctagccttataaggctcccaaatgtcggtatattttttggttatggtgacttcccacaatgcatagcgatatgtagatattgccaggagtacctcccacttctggtcctgtcagctcttttctaggacgcgcgcgctgcaggtttccagcctgtgattgggccagcaattccgggaatgaattgatgacgtcagcgtttgaattccatggc

SEQ ID NO: 875 - DNA, 250 bp, Cavia porcellus; identical to SEQ ID NO: 874

SEQ ID NO: 876 - DNA, 250 bp, Hydrochoerus hydrochaeris
tgagcttccctccgccctatgaaataaggtttcctaaagcgaaacttttaagactcacaaacctcaatttattttttgatcacggtgacttcccacaatgcataacgatatgtagatattgcaaggcgtacctcccacttgtgggcctgtccgctctttgctaggacgcacgcgccgcaggttcccagcctgtgattgggccagcgattccgggagcgaattgatgacgtcagcgtttgaactccatggc

SEQ ID NO: 877 - DNA, 250 bp, Hydrochoerus hydrochaeris
tgagcttccctccgccctatgaaataaggcttcctaaagcgaaacttttaagactcacaaacctcaatttattttttgatcacggtgacttcccacaatgcataacgatatgtagatattgcaaggcgtacctcccacttgtgggcctgtccgctctttgctaggacgcacgcgccgcaggttcccagcctgtgattgggccagcgattccgggagcgaattgatgacgtcagcgtttgaactccatggc

SEQ ID NO: 878 - DNA, 250 bp, Hydrochoerus hydrochaeris
tgagcttccctccgccctatgaaataaggtttcctaaagcgaaacttttaagactcacaaacctcaatttattttttgatcacggtgacttcccacaatgcataacgatatgtagatattgcaaggcgtacctcccacttgtgggcctgtccgttctttgctaggacgcacgcgccgcaggttcccagcctgtgattgggccagcgattccgggagcgaattgatgacgtcagcgtgtgaactccatggc

SEQ ID NO: 879 - DNA, 249 bp, Hydrochoerus hydrochaeris
tgagcttccctcgccctatgaaataaggtttcctaaagcgaaacttttaagactcacaaacctcaatttattttttgatcacggtgacttcccacaatgcataacgatatgtagatattgcaaggcgtacctcccacttgtgggcctgtccgttctttgctaggacgcacgcgccgcaggttcccagcctgtgattgggccagcgattccgggagcgaattgatgacgtcagcgtttgaactccatggc

SEQ ID NO: 880 - DNA, 251 bp, Cuniculus paca
tgagcttccctccgccctatgaaaggaaacattcccaacttacacttataaggactccaaatctcagtatatttttacggtcacggtgacttcccacaagacacagcgatatgtagatatcgcgaggagtacctcccacttctggtcccgccagctctttgctagggcgcacgcgctgtaggttcacagcctgtgattgggcccgcgattccgggagcgaattgatgacgtcggcgtgtgacctccatggc

SEQ ID NO: 881 - DNA, 250 bp, Dasyprocta punctata
tgagcttccctccgccctaccaaggaacaggtctcaaagagacacttataaggatcccaaatccctgtatattttttgatcacggtgacttcccacaagacacagcggtatgtagatatcacgaggagtaccgcccagttttggtcctgtcagctctttgctagggcgcaagcgctacaggtcaaccgcctgtgattgggcctgggattccggaggcgaattggtgacgtcagcgtttgaactccatggc

SEQ ID NO: 882 - DNA, 237 bp, Dinomys branickii
tgagcttccctccaccctatgaaagcaaaggctctcgaccagaatttataagaagccgaaaccttggtatactttttgatcatggtgatttcccacaatacacagcgatatgcagatatcgcgaggagcccctcccggttctgttcctgccacggctcactaaagcgcatgcgctgcaggtccgatgcgtgatattcctgggagcgagttggtgacgtcagtttgaactccatggcg

SEQ ID NO: 883 - DNA, 252 bp, Erethizon dorsatum
tgagcttccctccgccctatggaagcagaagttctcaaccagaacttataagaggcccaaatctcagtatattttttggtcacggtgacttcccacaatacacagcgatatgtagatatcgcgaggagcacctcccagttctggtcctgtcagctcctcagtagggcgcatgcgctgcaggttcacagcctgtgactgggccagagattacggggagcgagtcgatgacgtcagcgtttgaactccatggcg

SEQ ID NO: 884 - DNA, 251 bp, Chinchilla lanigera
tgagcttccctccaccctatgaaagccgaaggtttggagcgaaacttataagaagcccaaatctcactatatttttaggtcatggcgacttcccacaagccacagcgatatgtagatatcgcgaggagcccctcccagttctggtccttccgcgtctcactaaagcgcatgcgctgcaggttcgcggcctgcgactgggcctgcaattcctgggagcgagttgatgacgtcagcgtttgaactccatggcg

SEQ ID NO: 885 - DNA, 260 bp, Heterocephalus glaber
tgagcttccctccgccccataagagaaagttgttgaagcagaagttataaggttcccacagctcagcatatcttatggtcatggtcacttcccagaagacatagcgatatgtagatatggtgagaagcacctcccaattatggcccagtcggctccttgctaaggcgcacgcgtactagcgtactatgggttccccgcctgtgactgagcccgcgattcctggagcgagttgatgacatcagcgtttgaactccatggcg

SEQ ID NO: 886 - DNA, 260 bp, Heterocephalus glaber; identical to SEQ ID NO: 885

SEQ ID NO: 887 - DNA, 260 bp, Heterocephalus glaber
tgagcttccctccgccccataagagaaagttgttgaagcagaaattataaggttcccacagctcagcatatcttatggtcatggtcacttcccagaagacatagcgatatgtagatatggtgagaagcacctcccaattctggcccagtcggctccttgctaaggcgcacgcgtactagcgtactatgggttccccgcctgtgactgagcccgcgattcctggagcgagttgatgacatcagcgtttgaactccatggcg

SEQ ID NO: 888 - DNA, 252 bp, Fukomys damarensis
tgagcttccctccgccccatggcaagggatgattgaaataggccttataagaggcccagatcttagtatattttttgatcatggtgacttcccacaacacacagcgatatgcagataggctggggagcacctcccaattccggcccagtcggttcttggctggggcgcacgcgccctgcgggttcccggcctgtgattgagcccgcgattcttggagcgagttgatgacgtcagcgtttgaactccatggcg

SEQ ID NO: 889 - DNA, 252 bp, Fukomys damarensis; identical to SEQ ID NO: 888

SEQ ID NO: 890 - DNA, 230 bp, Hystrix cristata
tgagcttccctccgccctatgagaacggcttgctggaagcacaacttataaaactccaaaacctctacacattttttgatcatgatgacttcccacaatgcgctgcgatatgcagatatcacggggagcaccgcccagttctggtccctgtggcgcatgcgcactgcaggttcccgagcccgcgagtccccggagcgagttgatgacgtcagcctctgagctccatggcg

SEQ ID NO: 891 - DNA, 239 bp, Myocastor coypus
tgagcttccctccaccctacaacgcagctaggtccacacggggactataagaggaccaaatctcaaaatgcttcttggtcagggtgacttcccagaatacacagcgatatgtagatttcctcccctactgagactttggctcctcactagggcgcatgcgctacaggtccccggcctatgactggaccagcgatttccccggagcgaattgatgacgtcagcatttgaactccatggcg

SEQ ID NO: 892 - DNA, 248 bp, Thryonomys swinderianus
tgagcttccctctgcctcagaagtaagagctttctgagccaaagcttataaagagccaaaactcaggctatattttggtcatggtgacttcccataatacgcagcgatatgtagatacagcggggagcacctcccagttctggcccagtcgggtcctctctggggcgcacgcgcgctgcagttcccgccctgtgactgagcccgcgattcctgggagcgaattgacgtcaccgtttcaactcatggcg

SEQ ID NO: 893 - DNA, 256 bp, Petromus typicus
tgagcttccctccgcctcataagggaaagcttgtgaaccggagcttataaagatcccaaaatccacgctatatcttggttatggtgatttccaacaatacacagcgatatgtagatatagtgggaagcacctcccagttctggcccaatcgagtcctctctagggcgcaagcgcgctgtgggttcccggcctgtgcgagtgcctgagcccgcgattcctgggagcgagttgacgtcaccgtttgaacttcatggcg

SEQ ID NO: 894 - DNA, 253 bp, Ctenodactylus gundi
tgagcttccctccgccctatggagggaaaattgcggaggcagcgtttataaagctaccgaagccagcgatgccttaaagtcatggtgatttcccacaatacacagcaatatgcaaacagatggggggagtttcccggccctgatccaatcgtcttattgcctgggcgcacgcgccctgcgcgttcccagccaatgacggagcccgcgactggtagcggggagttgatgacgtcggagttcgaacgctatggcg

SEQ ID NO: 895 - DNA, 240 bp, Castor canadensis
tgagcttccctccgccctatgggggaaagtgggctggagcagggtttataaagctcccaagccttaagacattttttaatcacggtgatttcccacaacacatagcgtcatgcaaatataatggagtgtggggccctgcgcctttcgcaccagagcgcacgcgcgcgtcttcaggcctgtgacaacgagcggtagatcgcctggtgcaggttgatgacgtcagcgcttgaactccatggc

SEQ ID NO: 896 - DNA, 240 bp, Castor canadensis; identical to SEQ ID NO: 895

SEQ ID NO: 897 - DNA, 240 bp, Castor canadensis; identical to SEQ ID NO: 895

SEQ ID NO: 898 - DNA, 240 bp, Castor canadensis; identical to SEQ ID NO: 895

SEQ ID NO: 899 - DNA, 236 bp, Oryctolagus cuniculus; identical to SEQ ID NO: 703

SEQ ID NO: 900 - DNA, 256 bp, Dipodomys stephensi
tgagcttcccaccgccctacaggaaaggttgtgctgaggcagactttataagactcccgcgcagaaagaaactttatagttatggtgatttcccacaagccactgcgtcatgcaaataaagcagggttgactgcttccaagtatggaccttaaggttttctctaggccgcgtacgctctgcgtattcagccacgtgaccctgagccagtggttgttgggagcacgttgtggacctctgcgtttggattccatggcg

SEQ ID NO: 901 - DNA, 257 bp, Dipodomys ordii
tgagcttcccaccgccctacaggaaagacttcgctgaggcagactttataaggctcccgcgcagaaagaaactttatagttatggtgatttcccacaagccactgcgtcatgcaaataaagcagggttgacggcttccaagtatgtaccttaaggtttttttctaggccgcgtacgctctgcgtattcagccacgtgaccctgagccagtggttgttgggagcacgttgtggacctctgcgtttggattccatggcg

SEQ ID NO: 902 - DNA, 245 bp, Perognathus longimembris
tgagcttccctccgccttacaaagcggagagggcggcgcgcaaactttataagcctctgaaatgggaagttactttacagtcatggtgacttcccacaaggcactgcgtcatgcaaatattgcagggttggcggctttctttcgagctctccccaggccttgacgctgtgcatacgcacccacgtgaccctaagccaatggttgtcgggagcatgttgatacgtccgcgtttggattccatggcg

SEQ ID NO: 903 - DNA, 209 bp, Nannospalax galili
tgagcttccctccgcccagctgggcgtgtggctggccgcacttataaagcctccgaacggtcggcatttcacagtgatggtgacttcccacaagacacagcgctatgcaaatgtggcggcggcggcggttcgccagggcgcacgcgtgctgcgagttcccgccagccgaggccccgcgctgggtgacgtcacgctcgagcgcgatggcg

SEQ ID NO: 904 - DNA, 302 bp, Artificial Sequence
  Description of Artificial Sequence: Synthetic polynucleotide
  modified_base (150)..(150): a, c, t, or g
  modified_base (236)..(236): a, c, t, or g
  modified_base (266)..(266): a, c, t, or g
tgagcttccyycssccmyhtrrrrvrdrbdsrbywscmrgcvrvmhytataagrctcsmawrymkvmrkrhatttywayrvtyayggtgryttcccacaavrcacagcgmkacggtgywratwtrsmwgrghgyryckyscccmsbksbngbccdsycvksatttgcatgtbtyytmdcytvrggctkcmygckcrctagcgcgcatactgcrkgkysmsrgmcwrkgacagtgmnwragccygcgmwtcccgscysggmrmkrgntgatgacgtcatccccrkcsyyyrarckcsatggcg

SEQ ID NO: 905 - DNA, 302 bp, Artificial Sequence
  Description of Artificial Sequence: Synthetic polynucleotide
  modified_base (31)..(31): a, c, t, or g
  modified_base (101)..(101): a, c, t, or g
  modified_base (150)..(150): a, c, t, or g
  modified_base (155)..(155): a, c, t, or g
  modified_base (196)..(196): a, c, t, or g
  modified_base (236)..(236): a, c, t, or g
  modified_base (266)..(266): a, c, t, or g
tgagcttccyycssccvyhtrvrrvvddbdndbyhvcvrssvrvvhytataagrstcsvrdrbvkvmrbvhayttywayrvtyabggtrrytwcccacaanrcayagcgmbvcggwsywdatwtvsmdrrshsyryykyvycchvbkvbngbccnbbyvkbatttgcatgtbyybthdyytvvrsctkcmbgykcncwmgcgcgcayrctgyrkrkhsmsrrmmdrkgacagtgmnhrrscchgcgmwtyccgsyysggmrvdrrntgatgacgtcatccccrkssyyyrarmkcsatggcg

SEQ ID NO: 906 - DNA, 302 bp, Artificial Sequence
  Description of Artificial Sequence: Synthetic polynucleotide
  modified_base (25)..(25): a, c, t, or g
  modified_base (27)..(27): a, c, t, or g
  modified_base (29)..(29): a, c, t, or g
  modified_base (31)..(31): a, c, t, or g
  modified_base (71)..(71): a, c, t, or g
  modified_base (81)..(81): a, c, t, or g
  modified_base (101)..(101): a, c, t, or g
  modified_base (133)..(133): a, c, t, or g
  modified_base (149)..(151): a, c, t, or g
  modified_base (155)..(155): a, c, t, or g
  modified_base (178)..(178): a, c, t, or g
  modified_base (182)..(183): a, c, t, or g
  modified_base (185)..(185): a, c, t, or g
  modified_base (196)..(196): a, c, t, or g
  modified_base (225)..(225): a, c, t, or g
  modified_base (236)..(236): a, c, t, or g
  modified_base (266)..(266): a, c, t, or g
tgagcttccyycssccvyhydvrrnvndndndbyhvcvrssvrvvhytataagrbkcvvrdrbvbvvvbvnmyythwayrntyabggtrrytwcccasaanrcayagcghbvcggwsywdatwtvvhdrrshnyryybyvbcchvbbvnnnbccnbbbvdbatttgcatgtbybbthnbytnnrnctbcmbrykmncwmgcgcgcayrcyryrbrkhsvbrrmmnrksacagtgmnhrrscshgmgmwbyccgsyysgghdvdrrntgrtgacrtcatccccrkbsyyyrrvmkcsatggcg

SEQ ID NO: 907 - DNA, 302 bp, Artificial Sequence
  Description of Artificial Sequence: Synthetic polynucleotide
  modified_base (19)..(19): a, c, t, or g
  modified_base (22)..(22): a, c, t, or g
  modified_base (25)..(33): a, c, t, or g
  modified_base (35)..(35): a, c, t, or g
  modified_base (38)..(38): a, c, t, or g
  modified_base (41)..(41): a, c, t, or g
  modified_base (46)..(46): a, c, t, or g
  modified_base (55)..(55): a, c, t, or g
  modified_base (61)..(61): a, c, t, or g
  modified_base (65)..(66): a, c, t, or g
  modified_base (71)..(71): a, c, t, or g
  modified_base (81)..(81): a, c, t, or g
  modified_base (101)..(101): a, c, t, or g
  modified_base (111)..(111): a, c, t, or g
  modified_base (120)..(120): a, c, t, or g
  modified_base (125)..(125): a, c, t, or g
  modified_base (133)..(133): a, c, t, or g
  modified_base (135)..(135): a, c, t, or g
  modified_base (140)..(141): a, c, t, or g
  modified_base (144)..(144): a, c, t, or g
  modified_base (146)..(146): a, c, t, or g
  modified_base (148)..(153): a, c, t, or g
  modified_base (155)..(157): a, c, t, or g
  modified_base (159)..(159): a, c, t, or g
  modified_base (175)..(175): a, c, t, or g
  modified_base (178)..(178): a, c, t, or g
  modified_base (182)..(183): a, c, t, or g
  modified_base (185)..(185): a, c, t, or g
  modified_base (191)..(191): a, c, t, or g
  modified_base (196)..(196): a, c, t, or g
  modified_base (217)..(217): a, c, t, or g
  modified_base (225)..(225): a, c, t, or g
  modified_base (236)..(236): a, c, t, or g
  modified_base (243)..(243): a, c, t, or g
  modified_base (263)..(263): a, c, t, or g
  modified_base (266)..(266): a, c, t, or g
tgagcttccyycsvccvynhdnvvnnnnnnnnnbnvcndvnvrvvnywawaarvnkyvvrnrbvnnvvbvnmybthwahrntbrbggtrrytwcccasranrcrywgcghnvcgghsywnatwknvhdrrvhnbnbbbynnccnvnbnnnnnncnnnbndbatttgcatgtbbbnkhnbbtnnvnctbyhnrybmncwmgcgcgcayrcyryrbvknbvbvvmvnrdsmsagtgmnhrrbcsnkhrvdbyccgsyybgshdvnddntgrtgacrtcatccccrkbvyyyvrvhkcbatggcg

SEQ ID NO: 908 - DNA, 302 bp, Artificial Sequence
  Description of Artificial Sequence: Synthetic polynucleotide
  modified_base (13)..(13): a, c, t, or g
  modified_base (17)..(17): a, c, t, or g
  modified_base (19)..(22): a, c, t, or g
  modified_base (25)..(33): a, c, t, or g
  modified_base (35)..(36): a, c, t, or g
  modified_base (38)..(39): a, c, t, or g
  modified_base (41)..(42): a, c, t, or g
  modified_base (45)..(46): a, c, t, or g
  modified_base (55)..(55): a, c, t, or g
  modified_base (58)..(58): a, c, t, or g
  modified_base (61)..(61): a, c, t, or g
  modified_base (63)..(67): a, c, t, or g
  modified_base (69)..(71): a, c, t, or g
  modified_base (74)..(74): a, c, t, or g
  modified_base (77)..(77): a, c, t, or g
  modified_base (81)..(81): a, c, t, or g
  modified_base (101)..(101): a, c, t, or g
  modified_base (111)..(111): a, c, t, or g
  modified_base (120)..(120): a, c, t, or g
  modified_base (123)..(123): a, c, t, or g
  modified_base (125)..(126): a, c, t, or g
  modified_base (128)..(128): a, c, t, or g
  modified_base (130)..(130): a, c, t, or g
  modified_base (132)..(136): a, c, t, or g
  modified_base (139)..(141): a, c, t, or g
  modified_base (144)..(153): a, c, t, or g
  modified_base (155)..(161): a, c, t, or g
  modified_base (175)..(175): a, c, t, or g
  modified_base (177)..(178): a, c, t, or g
  modified_base (182)..(185): a, c, t, or g
  modified_base (190)..(191): a, c, t, or g
  modified_base (196)..(196): a, c, t, or g
  modified_base (212)..(212): a, c, t, or g
  modified_base (214)..(214): a, c, t, or g
  modified_base (217)..(218): a, c, t, or g
  modified_base (221)..(221): a, c, t, or g
  modified_base (225)..(225): a, c, t, or g
  modified_base (227)..(227): a, c, t, or g
  modified_base (236)..(240): a, c, t, or g
  modified_base (243)..(243): a, c, t, or g
  modified_base (245)..(245): a, c, t, or g
  modified_base (247)..(248): a, c, t, or g
  modified_base (255)..(255): a, c, t, or g
  modified_base (260)..(260): a, c, t, or g
  modified_base (262)..(264): a, c, t, or g
  modified_base (266)..(266): a, c, t, or g
  modified_base (285)..(286): a, c, t, or g
tgagcttccyhcnvccnbnnnnvvnnnnnnnnnbnncnnvnnvvnnhwwwaarvnbhnvrnvnnnnnvnnnvbnyhnahrntbrbggyvrytwcccabranvcrydrcghnvcgghsyhnatndnnhnrnvnnnnnbbnnnccnnnnnnnnnnhnnnnnnnatttgcatgtbbbnbnnbbtnnnnctbynndybhnswmgcgcgcayrcbrndnvbnnvbnvvvnvnvvsagtgmnnnnnbsndndnnbyccgvnbbgvndnnndnygdbgacvtcatccccdbnnhbhvrvhkybatggcg

SEQ ID NO: 909 - DNA, 302 bp, Artificial Sequence
  Description of Artificial Sequence: Synthetic polynucleotide
  modified_base (13)..(13): a, c, t, or g
  modified_base (17)..(22): a, c, t, or g
  modified_base (24)..(33): a, c, t, or g
  modified_base (35)..(36): a, c, t, or g
  modified_base (38)..(39): a, c, t, or g
  modified_base (41)..(42): a, c, t, or g
  modified_base (44)..(46): a, c, t, or g
  modified_base (55)..(58): a, c, t, or g
  modified_base (61)..(61): a, c, t, or g
  modified_base (63)..(71): a, c, t, or g
  modified_base (74)..(74): a, c, t, or g
  modified_base (77)..(77): a, c, t, or g
  modified_base (79)..(79): a, c, t, or g
  modified_base (81)..(81): a, c, t, or g
  modified_base (101)..(101): a, c, t, or g
  modified_base (110)..(111): a, c, t, or g
  modified_base (120)..(120): a, c, t, or g
  modified_base (123)..(128): a, c, t, or g
  modified_base (130)..(130): a, c, t, or g
  modified_base (132)..(136): a, c, t, or g
  modified_base (139)..(141): a, c, t, or g
  modified_base (144)..(153): a, c, t, or g
  modified_base (155)..(161): a, c, t, or g
  modified_base (175)..(175): a, c, t, or g
  modified_base (177)..(178): a, c, t, or g
  modified_base (182)..(185): a, c, t, or g
  modified_base (190)..(191): a, c, t, or g
  modified_base (194)..(194): a, c, t, or g
  modified_base (196)..(196): a, c, t, or g
  modified_base (212)..(212): a, c, t, or g
  modified_base (214)..(214): a, c, t, or g
  modified_base (217)..(218): a, c, t, or g
  modified_base (221)..(221): a, c, t, or g
  modified_base (225)..(227): a, c, t, or g
  modified_base (236)..(240): a, c, t, or g
  modified_base (243)..(245): a, c, t, or g
  modified_base (247)..(248): a, c, t, or g
  modified_base (255)..(255): a, c, t, or g
  modified_base (257)..(257): a, c, t, or g
  modified_base (259)..(260): a, c, t, or g
  modified_base (262)..(266): a, c, t, or g
  modified_base (283)..(283): a, c, t, or g
  modified_base (285)..(286): a, c, t, or g
  modified_base (289)..(289): a, c, t, or g
  modified_base (292)..(293): a, c, t, or g
  modified_base (296)..(296): a, c, t, or g
tgagcttccyhcnvccnnnnnnvnnnnnnnnnnbnncnnvnnvnnnhwwwarrvnnnnvvnvnnnnnnnnnvbnyhnanvnwbrbgryvdykdccmrbranvydhdrcrnnvcgghsyhnmynnnnnndnvnnnnnbbnnnccnnnnnnnnnnhnnnnnnnatttgcatgtbbbnbnnbbtnnnnctbhnndhnhnswmgcgcgcayrcbrndnvbnnvbnvvvnnnvvsagtgmnnnnnbbnnndnnbyccgvnbnsnndnnnnnbrdbgacvycatcccynbnnhbnvdnndbnatggcg

SEQ ID NO: 910 - DNA, 240 bp, Choloepus hoffmanni
tgagcttccctccgccctatagaaaaaaacatagtttatgctggatttataagattcccaaatctaaagccatttcacagttacggtgaacttcccactacacacggcgatatgcaaatatagcggaagtgttcctgaggcgtggtaaagcgcgcgcgcgctgagagttcccgccctgtggtgctgggctggagatgcctgagaactggctgatgacggcaacgttcgggctccatggcg

SEQ ID NO: 911 - DNA, 239 bp, Choloepus didactylus
tgagcttccctccgcccgataggaaaaatcgtgcctatgctggatttataagattcccacatctaaagccatttctcagttacggtgaacttcccactacacacggcgatatgcaaatatagcggaagtgttcctgaggcgtggtaaagcgcgcgcgcgctgagagttcccgccctgtggtgctgggctggagatgcctgagaactggctgatgacggcaacgttcgggctccatggcg

SEQ ID NO: 912 - DNA, 239 bp, Choloepus didactylus
tgagcttccctccgcccgatagaaaaaatcgtgcctacgctggatttataagattcccacatctaaagccatttctcagttacggtgaacttcccactacacacggcgatatgcaaatatagcggaagtgttcctgaggcgtggtaaagcgcgcgcgcgctgagagttcccgccctgtggtgctgggctggagatgcctgagaagtggctgatgacggcaacgttcgggctccatggcg

SEQ ID NO: 913 - DNA, 239 bp, Choloepus didactylus
tgagcttccctccgcccgatagaaaaaatagtgcctacgctggatttataagattcccacatctaaagccatttgtcagttacggtgaacttcccactacacacggcgatatgcaaatatagcggaagtgttcctgaggcgtggtaaagcgcgcgcgcgctgagagttcccgccctgtggtgctgggctggagatgcctgagaactggctgatgacggcaacgttcgggctccatggcg

SEQ ID NO: 914 - DNA, 238 bp, Bradypus variegatus
tgagcttccctccgccccatgaaaaacctgctttgaaaacgggatttataagactcccacatcaaaagccatttgacagttacggtgacttcccacaagacacggcgatatgcaaatatagcggaagtgttcctgaggcttggtaaagcgcacgcgcgctgggagttcccgccgtgtggtgctggtccctagatgcctgagagcgggctgatgacggcagcgtttgggctccatggcg

SEQ ID NO: 915 - DNA, 238 bp, Tamandua tetradactyla
tgagcttccctccgccctgtaaagagaagagggtgtttgccggatttataagattcccactgctaaagacatttcacagttatggtgacttcccacaacacttggcgatatgcaaatatcacggagttggccctgaggcgcggcgagacgcacgcgcgctgagagttcccgcctgctcaccctgggtccaaggttcctgaaggcgggttgaagactgcagtgtttgggtgccatggcg

SEQ ID NO: 916 - DNA, 238 bp, Myrmecophaga tridactyla
tgagcttccctccgccctacggggtaagagaggtgtttgcgggatttataagattcccattgctatagacatttcacagttatggtgacttcccacaacacctggcgatatgcaaatatcacggagttggccctgaggcgcggcgagacgcaggcgcgctgagagttcccgccttctcaccctgggtccaaggttcctggaggcgggttgaagactgcagtgtttgggcgccatggcg

SEQ ID NO: 917 - DNA, 237 bp, Tolypeutes matacus
tgagcttccctccgccctataggaagcgcgcactttaggcaggatttataagacacccatatctaaggacatttcacgattatggtgacttcccacaacacatagcgaaatgcaaatatgtggagcaggcgctgaggcgtggtcgggcgcacgcgcgctgctagttcccgcccttcggcgataggcccgagatgcctgagagctggttgatcacgcctgcgtttggactcaatggcg

SEQ ID NO: 918 - DNA, 237 bp, Chaetophractus vellerosus
tgagcttccctccgccctgtaagaaacccgcattttaggcaggatttataagacacccatagctaaagccatttcacggttatggtgacttcccagaatacatagcgaaatgcaaatatgtggagcaggcacggaggcgtggtcgggagcgcgcgcgctgcgagttcccgcccttcggcgctaggcctgagatgcctgagagcgggttgatcaggtctacgtttgtactcaatggcg

SEQ ID NO: 919 - DNA, 236 bp, Dasypus novemcinctus
tgagcttccctccgccctataaagcgatagttttttaaactggacttataaggcacccatatctacgtatatttcatggttagggtgatttcccacaacacatagcgaaatgcaaatatgtggagcgggcgctgaggcgtggtcgggcgcaagcgcgctgcgacttcccgcctttcggccctaggccccagattcctgggagctggatgatgacgttgacgttcggataccatggc

SEQ ID NO: 920 - DNA, 239 bp, Artificial Sequence
  Description of Artificial Sequence: Synthetic polynucleotide
  modified_base (38)..(38): a, c, t, or g
  modified_base (88)..(88): a, c, t, or g
  modified_base (121)..(121): a, c, t, or g
tgagcttccctccgccckatarrrarmvhsvdkybtangcdggatttataagaywcccayakctaaagmcatttcwcrgttayggtgnacttcccacwacacayrgcgawatgcaaatatngyggarswgkysctgaggcgtggtmrrgcgcrcgcgcgctgmgagttcccgccytkyggysctrggcysragatkcctgagarckggytgatgacgkcwrcgttyggrckccatggcg

SEQ ID NO: 921 - DNA, 239 bp, Artificial Sequence
  Description of Artificial Sequence: Synthetic polynucleotide
  modified_base (38)..(38): a, c, t, or g
  modified_base (88)..(88): a, c, t, or g
  modified_base (121)..(121): a, c, t, or g
  modified_base (191)..(191): a, c, t, or g
tgagcttccctccgccckrtrrrrhrmvhvvdkybtwnrcdggatttataagaywcccaywkctahrgmcatttswcrgttayggtgnacttcccacwabachyrgcgawatgcaaatatnryggarbwgkysctgaggcgyggyvrrrcgcrvgcgcgctgmgagttcccgccytbysrysctrggyysnagrtkcctgrrrrckggytgawsackkcwrygttyggrykcmatggcg

SEQ ID NO: 922 - DNA, 239 bp, Artificial Sequence; identical to SEQ ID NO: 921
  Description of Artificial Sequence: Synthetic polynucleotide
  modified_base (38)..(38): a, c, t, or g
  modified_base (88)..(88): a, c, t, or g
  modified_base (121)..(121): a, c, t, or g
  modified_base (191)..(191): a, c, t, or g

SEQ ID NO: 923 - DNA, 240 bp, Artificial Sequence
  Description of Artificial Sequence: Synthetic polynucleotide
  modified_base (28)..(29): a, c, t, or g
  modified_base (31)..(31): a, c, t, or g
  modified_base (33)..(33): a, c, t, or g
  modified_base (39)..(39): a, c, t, or g
  modified_base (42)..(42): a, c, t, or g
  modified_base (89)..(89): a, c, t, or g
  modified_base (122)..(122): a, c, t, or g
  modified_base (192)..(192): a, c, t, or g
tgagcttccctccgcccbryrrrrhrmnnvndnbybwwnrcnggayttataagrywcccahwkcwahrkmyatttswyrrttabggtgnayttcccaswabachyrgcgawatgcaaatatnryggarbdgkyvckgaggckyggyvrrrmgcrvgcgcgctgvkasttcccgccbkbysrysmtrgkyybnagrtkcctgrrrrskgghtgawsaskbydrygttygkrydcmatggcg

SEQ ID NO: 924 - DNA, 240 bp, Artificial Sequence; identical to SEQ ID NO: 923
  Description of Artificial Sequence: Synthetic polynucleotide
  modified_base (28)..(29): a, c, t, or g
  modified_base (31)..(31): a, c, t, or g
  modified_base (33)..(33): a, c, t, or g
  modified_base (39)..(39): a, c, t, or g
  modified_base (42)..(42): a, c, t, or g
  modified_base (89)..(89): a, c, t, or g
  modified_base (122)..(122): a, c, t, or g
  modified_base (192)..(192): a, c, t, or g

SEQ ID NO: 925 - DNA, 240 bp, Artificial Sequence; identical to SEQ ID NO: 923
  Description of Artificial Sequence: Synthetic polynucleotide
  modified_base (28)..(29): a, c, t, or g
  modified_base (31)..(31): a, c, t, or g
  modified_base (33)..(33): a, c, t, or g
  modified_base (39)..(39): a, c, t, or g
  modified_base (42)..(42): a, c, t, or g
  modified_base (89)..(89): a, c, t, or g
  modified_base (122)..(122): a, c, t, or g
  modified_base (192)..(192): a, c, t, or g

SEQ ID NO: 926-935 - skipped (10 entries)

SEQ ID NO: 936 - DNA, 227 bp, Artificial Sequence
  Description of Artificial Sequence: Synthetic polynucleotide
tggcaaacaccgccggcgcaaacagcatttataatgcgctcatacctaaagccacttgtcggttacggtgacttcccaacaagacattgcgacatgcaaatactacagtgcgtcccgccccctggtgtagttccacgctgggacgcacacgcactacggttcccgcctttagacgactgcgctggcgattcctgggagaggactgatgacgtcagcgttcgggctcc

SEQ ID NO: 937 - DNA, 227 bp, Artificial Sequence
  Description of Artificial Sequence: Synthetic polynucleotide
tggcaaacactgccggctcaaacagcatttataatgcgctcatacctaaagccacttgtcggttacggtgacttcccaacaagacattgcgacatgcaaatactgcggtgcgtcccgccccctggtgtagttccacgctgggacgcacacgcactacggttcccgcctttagacgactgcgccggcgattcctgggagaggactgatgacgtcagcgttcgggctcc

SEQ ID NO: 938 - DNA, 227 bp, Artificial Sequence
  Description of Artificial Sequence: Synthetic polynucleotide
tggcaaacaacgccggcgcaaacagcatttataatgcgctcatacctaaagccacttgtcggttacggtgacttcccaacaagacattgcgacatgcaaatattacagtgcgtcccgccccctggtgtagttccacgctaggacgcacacgcactacggttcccgcctttagacgactgcgctggcgattcctgggagcggactgatgacgtcagcgttcgggctcc

SEQ ID NO: 939 - DNA, 233 bp, Artificial Sequence
  Description of Artificial Sequence: Synthetic polynucleotide
tggcaaaaactgacggctcaagcagcatttataaggctcccatacctaaagacatttgtcggttatggtgacttccccacaagacattgcgacatgcaaatactgcggagcgtaccccctccccctggcgcaactcctcgctgggacgcacgcgcgctacgtgttcccgcctttagtgacgtctgcgccggcgattcctgggagagggttgatgacgtcagcgttcgggctcc

SEQ ID NO: 940 - DNA, 245 bp, Artificial Sequence
  Description of Artificial Sequence: Synthetic polynucleotide
tgggaaaaagtggcggctcacgcagcatttataaggctcccatacctaaagacatttcacggttatggtgacttccccacaagacatagcgacatgcaaatattgcggagcgtacgcgcctccccctgtcctgtgcaggcatcttctcagccaggacgcacgcgcgctgcgtgttcccgccctgagtgacttctgcgccggcgatttcctgggaggagggttgatgacgtcaacgttcgggctcc

SEQ ID NO: 941 - DNA, 230 bp, Artificial Sequence
  Description of Artificial Sequence: Synthetic polynucleotide
tggcaaaaactgccggctcaagcagcatttataatgcgcccatacctaaagccacttgtcggttacggtgacttcccaacaagacattgcgacatgcaaatactgcggtgcgtccctccccctggcgtaactccacgctgggacgcacgcgcgctacgtgttcccgcctttactgacgtctgcgccggcgattcctgggagagggttgatgacgtcagcgttcgggctcc

SEQ ID NO: 942 - DNA, 243 bp, Artificial Sequence
  Description of Artificial Sequence: Synthetic polynucleotide
tgggaaaaagtggcggctcacgcagcatttataaggctcccatacctaaagacatttcacggttatggtgacttccccacaagacattgcgacatgcaaatattgcggagcgtacgccctccccctgtcctgtgcaggcatcttctcgccaggacgcacgcgcgctgcgtgttcccgccttgagtgacttctgcgccggcgatttcctgggaggagggttgatgacgtcaacgttcgggctcc

SEQ ID NO: 943 - DNA, 277 bp, Artificial Sequence
  Description of Artificial Sequence: Synthetic polynucleotide
tgggaaaaagtgggggctcacgcagcatttataaggctcccatacctaaagacatttcacggttatggtgacttcccccacaatacatagcgacatgcaaatatcatggtccttccgcggggcgtgcggcctccccctgtcccgtgccccgtaggcgtcttctcagccaggagacgcacgcggcgcgctgcgtgttcccgccctgagtgacttctgggccggcgatttccctgggaggagggttggatgacgtcagcatcgccaacgttcgggctcc

SEQ ID NO: 944 - DNA, 287 bp, Artificial Sequence
  Description of Artificial Sequence: Synthetic polynucleotide
tgggaaaaagtggggctcacgcagaatttataaggctcccatacctaaagacatttcacggttatggtgacttcccccacaatacatagcgacatgcaaatatcatggtccttccgcggggcgtgcggcctccccctgtcccgtaccccgcaggcgtcttctcagccaggaggcgcacgcggcgcgctgcgccctgttcccgccctgagtgactagggattctgggcccgcgatttcccgctgggaggcgggttggatgacgtcagcatcgccagcgttcgggctcc

SEQ ID NO: 945 - DNA, 251 bp, Artificial Sequence
  Description of Artificial Sequence: Synthetic polynucleotide
tgggaaaaagtgggggctcacgcagcatttataaggctcccatacctaaagacatttcacggttatggtgacttccccacaatacatagcgacatgcaaatatcgcggggcgtgcggcctccccctgtcccgtgtaggcgtcttctcagccaggacgcacgcgcgctgcgtgttcccgccctgagtgacttctgggccggcgatttccctgggaggagggttgatgacgtcatcgccaacgttcgggctcc

SEQ ID NO: 946 - DNA, 285 bp, Artificial Sequence
  Description of Artificial Sequence: Synthetic polynucleotide
tgggaaaaagtggggctcacgcagaatttataaggctcccatacctaaagacatttcacggttatggtgacttcccccacaatacatagcgacatgcaaatatcatggtccttccgcggggcgtgcggcctccccctgtcccgtaccccgcaggcgtcttctcagccaggaggcgcacgcggcgcgctgcgccctgttcccgccctgagtgactagggattctgggcccgcgatttccctgggaggcgggttggatgacgtcagcatcgccagcgttcgggctcc

SEQ ID NO: 947 - DNA, 286 bp, Artificial Sequence
  Description of Artificial Sequence: Synthetic polynucleotide
tgggaaaaagtgggggctcacgcagaatttataaggctcccatacctaaagacatttcacggttatggtgacttcccccacaatacatagcgacatgcaaatatcatggtccttccgcggggcgtgcggcctccccctgtcccgtaccccgtaggcgtcttctcagccaggagacgcacgcggcgcgctgcgccctgttcccgccctgagtgactagggattctgggccggcgatttccctgggaggcgggttggatgacgtcagcatcgccagcgttcgggctcc

SEQ ID NO: 948 - DNA, 273 bp, Artificial Sequence
  Description of Artificial Sequence: Synthetic polynucleotide
tggggaaaggtgggctcaagcagaatttataaggctcccaaaactaaagacatttttcggttatggtgacttcccccacaatacacagcgacatgcaaatatcatggcccttccgtggagtgtgccctccctgcgctcgtcccccgggcctcttctcagccaggaggcgcacggcgcgctgcgcctgttcccgccctggggactaggagcgcgcccgcggttcccgctgggaggcgggttggatgacgtcagcatcgccagcgttcggactcc

SEQ ID NO: 949 - DNA, 261 bp, Artificial Sequence
  Description of Artificial Sequence: Synthetic polynucleotide
tggggagtggggggctcaggccgaatttataaggctcccaaaacggaagacatttttcagttatggtgacttcccccacaagacacagcgctatgcaaatatcatggcccctccgtggagtgtgccctccccggccgcttctcagccaggaagcgcacggcgcgtctgcgcctgtttcccgccctggggactagaaaagcgcccgcgcatcccggccgggccgcgggttgatgacgtcagcatcgccagcgctcgagcgcc

SEQ ID NO: 950 - DNA, 280 bp, Artificial Sequence
  Description of Artificial Sequence: Synthetic polynucleotide
tggggaaaggtgggctcaagcagaatttataaggctcccaaacctaaagacattttacggttatggtgacttcccccacaacacacagcgacatgcaaatatcatggtccttccgtggagtgtgccctccctgcgctcgtcccccgggcctcttctcagccaggaggcgcacgcgcgcacgcgcgctgcgcctgttcccgccctggtgactaggagcgcgcccgcggttcccgctgggaggcgggttggatgacgtcagcatcgccagcgtttggactcc

SEQ ID NO: 951 - DNA, 288 bp, Artificial Sequence
  Description of Artificial Sequence: Synthetic polynucleotide
tgggaaaaagtggggctcaagcagaatttataaggctcccaaacctaaagacattttacggttatggtgacttcccccacaacacacagcgacatgcaaatatcatggtccttccgcggggtgtgcggcctccctgctctcgtcccccaggcgtcttctcagccaggaggcgcacgcgcgcacgcgcgctgcgccctgttcccgccctggtgactagggagcctgagcccgcgatttcccgctgggaggcgggttggatgacgtcagcatcgccagcgtttggactcc

SEQ ID NO: 952 - DNA, 261 bp, Artificial Sequence
  Description of Artificial Sequence: Synthetic polynucleotide
tggggagtggggggctcaggccgaatttataaggctcccaaaacggaagacatttttcagttatggtgacttcccccacaagacacagcgctatgcaaatatcatggcccctccgtggagtgtgccctggccccggccgcttctcagccaggaagcgcacggcgcgctgcgcctgttcccgccctggggactagaaaagcgcccgcgcatcccgccgggccgcgggttggatgacgtcagcatcgccagcgctcgagcgcc

SEQ ID NO: 953 - DNA, 262 bp, Artificial Sequence
  Description of Artificial Sequence: Synthetic polynucleotide
tggggagtggcggcctcaggcgggatttataaggctcccaaaaccggtgccatttctcagtgagggtgacttcccccacaatacacagcggtatgcaaatatcagttgcgtcagagtagagcgcggcctccccggcctctcctcagccaggaagcgcgcggcgctcctgttttcgtctcccgccccggtgacgagagacgcgcgcgcgcaccgtagccgggccgcgggttggtgacgtaagcggcatccgctttcgagcgcc

SEQ ID NO: 954 - DNA, 218 bp, Artificial Sequence
  Description of Artificial Sequence: Synthetic polynucleotide
cggcaaataacgcgcgcaaacagcatttataatgagctcatacctaaagccactttacggttacggtgacttcccacaagacattgcggcatgcaaatattttagtgcgtcccgcccctggtagttccacgctaggacgcacacgcactacggttcccgcctttagactgcgctggcgattccagcgagcggactgatgacgtcagcgttggggctcc

SEQ ID NO: 955 - DNA, 218 bp, Artificial Sequence
  Description of Artificial Sequence: Synthetic polynucleotide
cggcgaacaacgcgcgcaaacagcatttataatgcgctcatacctaaagccacttttcggttacggtgacttcccacaagacattgcggcatgcaaatattttagtgcgtcccgcccctggtagttccacgctaggacgcacacgcactacggttcccgcctttagactgcgctggcgattccagcgagcggactgatgacgtcagcgttggggctcc

SEQ ID NO: 956 - DNA, 218 bp, Artificial Sequence
  Description of Artificial Sequence: Synthetic polynucleotide
cggcaaacaacgcgcgcaaacagcatttataatgagctcatacctaaagcaactttacggttacggtgacttcccacaagacattgcgacatgcaaatattttagtgtatcccgcccctggtagttccacgctaggacgcacacgcactccggttcccgcctttagactgcgctggcgattccagggagcgggctgatgacgtcagtgttcgggctcc

SEQ ID NO: 957 - DNA, 218 bp, Artificial Sequence
  Description of Artificial Sequence: Synthetic polynucleotide
cggcaaacaacgcgcgcaaacagcatttataatgagctcatacctaaagcaactttacggttacggtgacttcccacaagacattgcgacatgcaaatattttagtgtatcccgcccctggtagttccacgctaggacgcacacgcactccggttcccgcctttagactgcgctggcgattccagggagcggactgatgacgtcagtgttcgggctcc

SEQ ID NO: 958 - DNA, 218 bp, Artificial Sequence
  Description of Artificial Sequence: Synthetic polynucleotide
cggccaacagctcgcgcaaacagcatttataatgagctcatacctaaagcaactttacggttacggtgacttcccacaagacattgcgacatgcaaatattttagtgtatcccgcccctggtagttccacgctaggacgcacacgcactgcggttcccgcctttagactgcgctggcgattccagggagcggactgatgacgtcagtgttcgggctcc

SEQ ID NO: 959 - DNA, 218 bp, Artificial Sequence
  Description of Artificial Sequence: Synthetic polynucleotide
cggcaaacaatgcgcgcaaacagcatttataatgagctcatacctaaagccactttacggttacggtgacttcccacaagacattgcgatatgtaaatattttagtgcatcccgcccctggtagttccacgctaggacgcacacgcactacggttcccgcctttagattgcgctggcgattccagggagcggactgatgacgtcagcgttcgggctcc

SEQ ID NO: 960 - DNA, 218 bp, Artificial Sequence
  Description of Artificial Sequence: Synthetic polynucleotide
cggcaaacaacgcgcgcaaacagcatttataatgagctcatacctaaagcaacttttcggttacggtgacttcccacaagccattgcgacatgcaaatattttagtgtatcccgcccctggtagttccacgctaggacgcacacgcactccggttcccgcctttagactgcgctggcgattccggggagcgggctgatgacgtcagtgttcgggctcc

SEQ ID NO: 961 - DNA, 218 bp, Artificial Sequence
  Description of Artificial Sequence: Synthetic polynucleotide
cggcaaacaatgcgtgcacacagcacttataatgcgctcacacctaaagccacttttcagttacggtgacttcccacaagacattgcgatatgcaaatattttagcgcatcccgcccctggtagttccacgcgaggacgcacacgcactacggttcccgcctttagactgcgctggcgattccagggagcggcctgatgacgtcagcgttcgggctcc

SEQ ID NO: 962 - DNA, 218 bp, Artificial Sequence
  Description of Artificial Sequence: Synthetic polynucleotide
cggcaaacaatgcgtgcacacagcatttataatgcgctcacacctaaagccacttttcagttacggtgacttcccacaagacattgcgatatgcaaatattttagcgcgtcccgcccctggtagttccacgcgaggacgcacacgcactacggttcccgcctttagactgcgctggcgattccagggagcggcctgatgacgtcagcgttcgggctcc

SEQ ID NO: 963 - DNA, 218 bp, Artificial Sequence
  Description of Artificial Sequence: Synthetic polynucleotide
cggcaaacagtgcgcgcaaacagcatttataatgcgctcatacctaaagccacttttcggttacggtgacttcccacaagacattgcgacatgcaaatattttagtgcgtcccgcccctggtagttccacgctaggacgcacacgcactacggttcccgcctttagactgcgctggcgattcctgggagcggactgatgacgtcagcgttcgggctcc

SEQ ID NO: 964 - DNA, 218 bp, Artificial Sequence
  Description of Artificial Sequence: Synthetic polynucleotide
cggcaaacaacgcgcgcaaacagcatttataatgcgctcatacctaaagccactttacggttacggtgacttcccacaagacattgcgacatgcaaatattttagtgcatcccgcccctggtagttccacgctaggacgcacacgcactacggttcccgcctttagactgcgctggcgattccagggagcggactgatgacgtcagcgttcgggctcc

SEQ ID NO: 965 - DNA, 218 bp, Artificial Sequence
  Description of Artificial Sequence: Synthetic polynucleotide
cggcaaacaacgcgcgcaaacagcatttataatgagctcatacctaaagcaactttacggttacggtgacttcccacaagacattgcgacatgcaaatattttagtgtatcccgcccctggtagttccacgctaggacgcacacgcactacggttcccgcctttagactgcgctggcgattccagggagcggactgatgacgtcagtgttcgggctcc

SEQ ID NO: 966 - DNA, 218 bp, Artificial Sequence
  Description of Artificial Sequence: Synthetic polynucleotide
cggcaaacaacgcgcgcaaacagcatttataatgagctcatacctaaagcaactttacggttacggtgacttcccacaagacattgcgacatgcaaatattttagtgtatcccgcccctggtagttccacgctaggacgcacacgcactacggttcccgcctttagactgcgctggcgattccagggagcgggctgatgacgtcagcgcccgggctcc

SEQ ID NO: 967 - DNA, 219 bp, Artificial Sequence
  Description of Artificial Sequence: Synthetic polynucleotide
tggcaaacaatccgcgcaaacagcatttataatgcgctcatacctagagccacttttcggttacggtgacttctcacaagacattgggacatgcaaatattacagtgcgtcccgcccctggttagttctacgctaggacgcacacgcactacggttcccgcctttagactgcgctggcggttcctgggagcggactgatgacgtcagtgttcgggatcc

SEQ ID NO: 968 - DNA, 219 bp, Artificial Sequence
  Description of Artificial Sequence: Synthetic polynucleotide
tggcaaacaacgcgcgcaaacagcatttataatgcgctcatacctagagccacttttcggttacggtgacttctcacaagacattgggacatgcaaatattacagtgcgtcccgcccctggttagttctacgctaggacgcacacgcactacggttcccgcctttagactgcgctggcgattcctgggagcggactgatgacgtcagcgttcgggatcc

SEQ ID NO: 969 - DNA, 226 bp, Artificial Sequence
  Description of Artificial Sequence: Synthetic polynucleotide
tggcaaacaacgccggcgcaaacagcatttataatgcgctcatacctagagccacttttcggttacggtgacttctcaacaagacattgggacatgcaaatattacagtgcgtcccgcccctggtgtagttctacgctaggacgcacacgcactacggttcccgcctttagacgactgcgctggcgattcctgggagcggactgatgacgtcagcgttcgggatcc

SEQ ID NO: 970 - DNA, 219 bp, Artificial Sequence
  Description of Artificial Sequence: Synthetic polynucleotide
tggcaaacaccgcacgcaaatagcatttataatgtgctcatacctagagccacttttcggttacggtgacttctcaaaaagacagtgggacatgcaaatattacagtgcgtcccgcccctggtaggtctacgctaggacgcacgcgcactacggttcccgcctatagactgcgctggcgattcctgggagcggactgatgacgtcagcgttcgggatcc

SEQ ID NO: 971 - DNA, 226 bp, Artificial Sequence
  Description of Artificial Sequence: Synthetic polynucleotide
tggcaaacaacgccggcgcaaacagcatttataatgtgctcatacctagagccacttttcggttacggtgacttctcaacaagacattgggacatgcaaatattacagtgcgtcccgcccctggtgtagttctacgctaggacgcacgcgcactacggttcccgcctatagacgactgcgctggcgattcctgggagcggactgatgacgtcagcgttcgggatcc

SEQ ID NO: 972 - DNA, 226 bp, Artificial Sequence
  Description of Artificial Sequence: Synthetic polynucleotide
tggcaaacaacgccggcgcaaacagcatttataatgtgctcatacctagagccacttttcggttacggtgacttctcaaaaagacattgggacatgcaaatattacagtgcgtcccgcccctggtgtagttctacgctaggacgcacgcgcactacggttcccgcctatagacgactgcgctggcgattcctgggagcggactgatgacgtcagcgttcgggatcc

SEQ ID NO: 973 - DNA, 218 bp, Artificial Sequence
  Description of Artificial Sequence: Synthetic polynucleotide
tgccaaacaacgcgcgcaaacagcatttataatgcactcataagtagagccacttttcggttatggtgacttctcacaaggaattgggacatgcaaatattacagtgcgtcccgcccctggtagttctgcgctaggacgcagacgcactacggttcccgcctttagaccgcgctggcgattcctgggagcggactgatgacgtcagcgttcgggatcc

SEQ ID NO: 974 - DNA, 218 bp, Artificial Sequence
  Description of Artificial Sequence: Synthetic polynucleotide
tgccaaacaacgcgcgcaaacagcatttataatgcactcataagtagagccacttttcggttatggtgacttctcacaaggaattgggacatgcaaatattacagtgcgtcccgcccctggtagttctgcgctaggacgcagacgcactacggttcccgcctttagactgcgctggcgattcctgggagcggactgatgacgtcagcgttcgggatcc

SEQ ID NO: 975 - DNA, 214 bp, Artificial Sequence
  Description of Artificial Sequence: Synthetic polynucleotide
tgccaaacaacgcgcgcaaacagcatttataatgcactcataagtagagccacttttcggttatggtgacttctcacaaggaattgggacatgcaaatattacagtgcgtcccgcccctggtagttctacggacgcagacgcactacggttcccgcctttagactgcgctggcgattcctgggagcggactgatgacgtcagcgttcgggatcc

SEQ ID NO: 976 - DNA, 218 bp, Artificial Sequence
  Description of Artificial Sequence: Synthetic polynucleotide
tggcaaacaccgcgcgcaaccagcatttataatgcgctcgtacctaaaggcacttgtcggttacggtgacttcccacaagacattgcgacatgcaaatactacagtgcgtcccgcccctggtagttccacgctgggacgcacacgcagtacggttcccgcctttagactgcgctggcgattcctgggagaggattgatgacgtcagcgttcgggctcc

SEQ ID NO: 977 - DNA, 218 bp, Artificial Sequence
  Description of Artificial Sequence: Synthetic polynucleotide
cggcacaaaacgcgggcaaacagcatttataatgcgctcatacctaaagccactttacggttacggtgacttcccacaagacattgcgacatgcaaatattttagtgcgtcccgcccctggtagttccacgctaggacacacacgcactatgcttccggcctttagactgcgccggtgattccagggagcggactgatgacgtcagcgttccggctcc

SEQ ID NO: 978 - DNA, 218 bp, Artificial Sequence
  Description of Artificial Sequence: Synthetic polynucleotide
cggcaaaaaacgcgggcaaacagcatttataatgcgctcatacctaaagccactttacggttacggtgacttcccacaagacattgcgacatgcaaatattttagtgcgtcccgcccctggtagttccacgctaggacacacacgcactatggttccggcctttagactgcgccggtgattccagggagcggactgatgacgtcagcgttcgggctcc

SEQ ID NO: 979 - DNA, 218 bp, Artificial Sequence
  Description of Artificial Sequence: Synthetic polynucleotide
cggcaaacaacgcgcgcaaacagcatttataatgcgctcatacctaaagccactttacggttacggtgacttcccacaagacattgcgacatgcaaatattttagtgcgtcccgcccctggtagttccacgctaggacgcacacgcactacggttcccgcctttagactgcgctggcgattccagggagcggactgatgacgtcagcgttcgggctcc

SEQ ID NO: 980 - DNA, 218 bp, Artificial Sequence
  Description of Artificial Sequence: Synthetic polynucleotide
tggcgaataacacgcgcaaagagcatttataacgcgctcagacctaaagccacttgtcgcttacggtgacttcccataagacattgcaatatgcaaatactccagtgcgtcccgcccctggcagttccacgctgggacgtgcacgcactacggttcccgcctttagactgcgctcgcgattcctgggagagggctgatgacgtcagcgttcgggctcc

SEQ ID NO: 981 - DNA, 218 bp, Artificial Sequence
  Description of Artificial Sequence: Synthetic polynucleotide
tggcgaaaatcacgcgcaaagagcatttataacgtgctcagacctaaagccacttgtcgcttacggtgactccccataagacattgcgatatgcaaatactgcagtgcgtcccgcccctggcagttccacgctgggacgtacacgtactacggttcccgcctttagactgcgctcgcgattcctgggagagggctgatgacgtcagcgttcgggctcc

SEQ ID NO: 982 - DNA, 218 bp, Artificial Sequence
  Description of Artificial Sequence: Synthetic polynucleotide
tggcgaaaaacacgcgcaaagagcatttataacgtgctcagacctaaagccacttgtcgcttacggtgactccccataagacattgcgatatgcaaatactgcagtgcgtcccgcccctggcagttccacgctgggacgtgcacgcactacggttcccgcctttagactgcgctcgcgattcctgggagagggctgatgacgtcagcgttcgggctcc

SEQ ID NO: 983 - DNA, 218 bp, Artificial Sequence
  Description of Artificial Sequence: Synthetic polynucleotide
cggcgaaaaacacgcgcaaagagcgtttataatgcgctcagacctaaagtaacttgtcacttacggtgacttcccataagacattgcgatatgcaaatattccagtgcgtcccgcccctggcagttccacgccgggacgtgcacgcactacggttcccgcctttagactgcgctggcgattcctgggagagggctgatgacgtcagcgtgcgggctcc

SEQ ID NO: 984 - DNA, 218 bp, Artificial Sequence
  Description of Artificial Sequence: Synthetic polynucleotide
cggcgaaaaacacgcgcaaagagcgtttataacgcgctcagacctaaagctacttgtcacttacggtgacttcccataagacattgcgatatgcaaatattccagtgcgtcccgcccctggcagttccacgctgggacgtgcacgcactacggttcccgcctttagactgcgctggcgattcctgggagagggctgatgacgtcagcgtgcgggctcc

SEQ ID NO: 985 - DNA, 218 bp, Artificial Sequence
  Description of Artificial Sequence: Synthetic polynucleotide
cggcgaaaaacacgcgcaaagagcgtttataacgcgctcagacctaaagctacttgtcacttacggtgacttcccataagacattgcgatatgcaaatattccagtgcgtcccgcccctggcagttccacgctgggacgtgcacgcactacggttcccgcctttagactgcgctggcgattcctgggagagggctgatgacgtcagcgttcgggctcc

SEQ ID NO: 986 - DNA, 218 bp, Artificial Sequence
  Description of Artificial Sequence: Synthetic polynucleotide
tggcgaaaaacacgcgcaaagagcatttataacgcgctcagacctaaagccacttgtcgcttacggtgacttcccataagacattgcgatatgcaaatattacagtgcgtcccgcccctggcagttccacgctgggacgtgcacgcactacggttcccgcctttagactgcgctggcgattcctgggagagggctgatgacgtcagcgttcgggctcc

SEQ ID NO: 987 - DNA, 218 bp, Artificial Sequence
  Description of Artificial Sequence: Synthetic polynucleotide
tggcgaaaaacacgcgcaaagagcatttataacgcgctcagacctaaagccacttgtcgcttacggtgacttcccataagacattgcgatatgcaaatactacagtgcgtcccgcccctggcagttccacgctgggacgtgcacgcactacggttcccgcctttagactgcgctcgcgattcctgggagagggctgatgacgtcagcgttcgggctcc

SEQ ID NO: 988 - DNA, 218 bp, Artificial Sequence
  Description of Artificial Sequence: Synthetic polynucleotide
tggcgaaaaacgcgcgcaaagagcatttataatgcgctcagacctaaagccacttgtcgcttacggtgacttcccataagacattgcgatatgcaaatattacagtgcgtcccgcccctggcagttccacgctgggacgtgcacgcactacggttcccgcctttagactgcgctggcgattcctgggagagggctgatgacgtcagcgttcgggctcc

SEQ ID NO: 989 - DNA, 218 bp, Artificial Sequence
  Description of Artificial Sequence: Synthetic polynucleotide
tggaggagaacgcgcgcaaagagcatttataatgcgcgcagacctaaagccacttgtcgcttacggtgacttcccataagacattgcgatatgcaaatattacagtgcgtcccgcccctggcagttccacgctgggacgtgcacgcgctacggttcccgcctttagactgcgctggcgattcctgggagagggctgatgacgtcagcattcgggctcc

SEQ ID NO: 990 - DNA, 222 bp, Artificial Sequence
  Description of Artificial Sequence: Synthetic polynucleotide
tggcaaaaactgagctcaagcagcatttataaggctcccaaacctaaagacatttgtcggttatggtgacttcccacaacacattgcgacatgcaaatactgcggagcgtaccccctcccctggcaactcctcgctgggacgcacgcgcgctacgtgttcccgccttttgactgcgccggcgatacctgggagagggttgatgacgtcagcgttcgggctcc

SEQ ID NO: 991 - DNA, 234 bp, Artificial Sequence
  Description of Artificial Sequence: Synthetic polynucleotide
tgggaaagggtgggctcacgcagcctttataaggctcccaaacttaaagacatttctcggttatggcgacttcccacaagacatagcgacatgcaaatactgcagacctgtggcgccgacccggtcctgtgcagccatctttacggctgggacgcacgcgcgctgcgtgttcccgccctgtgactgcgccggcgattactgggagaggattgatgacgtcaacgttcgggttcc

SEQ ID NO: 992 - DNA, 234 bp, Artificial Sequence
  Description of Artificial Sequence: Synthetic polynucleotide
tgagagagggtgggctcacgccacctttataaggctcccaaacttaaagacatttctcggttatggcgacttcccacaacacatagcgacatgcaaatactgcagacctgtggcgccgacccggtcctgtgcagccatctttacggctgggacgcacgcgcgctgcgtgttcccgccctgtgactgcgccggcgattactgggagaggattgatgacgtcaacgttcgggttcc

SEQ ID NO: 993 - DNA, 229 bp, Artificial Sequence
  Description of Artificial Sequence: Synthetic polynucleotide
cgtaggaaaactgcttctgtgagcacttataaaactcccataagtagagagatttcatagttatggtgacttcccataagacattgcgacatgcaaatattgtggcgcgttcgtccccgtccggtgcaggcagcttcgctccaggacgcacgcgcaatacatgttcccgccttgagactgcgccggcagattcctaggaagtggttgatgacgtcgatgttagggatcc

SEQ ID NO: 994 - DNA, 229 bp, Artificial Sequence
  Description of Artificial Sequence: Synthetic polynucleotide
cgtaggaaaactgcttctgtgagcacttataaaactcccataagtagagagatttcatagttatggtgacttcccataagacattgcgacatgcaaatattgtggcgcgttcgtccccgtccggtgcaggcagcttcgctccaggacgcacgcgcaatacatgttcccgccttgagactgcgccggccgattcctaggaagtggttgatgacgtcgatgttggggctcc

SEQ ID NO: 995 - DNA, 229 bp, Artificial Sequence
  Description of Artificial Sequence: Synthetic polynucleotide
cgtaggaaaactgcttctgtgagcacttataaaactcccataagtagagagatttcatagttatggtgacttcccataagacattgcgacatgcaaatattgtggcgcgttcgtccccgtccggtgcaggcagcttcgctccaggacgcacgcgcactacatgttcccgccttgagactgcgccggccgattcctaggaagtggttgatgacgtcgatgttggggctcc

SEQ ID NO: 996 - DNA, 230 bp, Artificial Sequence
  Description of Artificial Sequence: Synthetic polynucleotide
cggagaaaacctgcttcaccgagcatttataaagctcccatacttaaagagatttcatagttatggtgacttcccacaagacattgcgacatgcaaatattgtggagcgtacttccccgtcctgtgcaggcagcttcccgccaggacgcacgcgcgctgcgtgttcccgccttgagactgcgccggcgatttcctaggagggtggttgatgacgtcaatgttcgggctcc

SEQ ID NO: 997 - DNA, 219 bp, Artificial Sequence
  Description of Artificial Sequence: Synthetic polynucleotide
tgccgaaagtttagctcaacctgcatttataaggctcccaaacctaaagacatttgtcggttatggtgacttcccgcaacacattgcgacatgcaaatactgcggagcgtacctcccctggcaactcctcgctgggacgcacgcgcgctgcgtgctcccgccttttgactgcgccggcgatacttgggagagggttgatgacgtcagcgttctggctcc

SEQ ID NO: 998 - DNA, 219 bp, Artificial Sequence
  Description of Artificial Sequence: Synthetic polynucleotide
tgccgaaagtttagctcaacctgcatttataaagctcccaaacctaaagacatttgtcggttatggtgacttcccgcaacacattgcgacatgcaaatactgcggagtgcacctcccctggcaactcctcgctgggacgcacgcgcgctgcgtgctcccgccttttgactgcgccggcgatacttgggagagggttgatgacgtcagcgttctggctcc

SEQ ID NO: 999 - DNA, 222 bp, Artificial Sequence
  Description of Artificial Sequence: Synthetic polynucleotide
tgccgaaagtttagctcaacctgcatttataaggctcccaaacctaaagacatttgtcggttatggtgacttcccgcaacacattgcgacatgcaaatactgcggagcgtaccccctcccctggcaactcctcgctgggacgcacgcgcgctgcgtgctcccgccttttgactgcgccggcgatacttgggagagggttgatgacgtcagcgttctggctcc

SEQ ID NO: 1000 - DNA, 222 bp, Artificial Sequence
  Description of Artificial Sequence: Synthetic polynucleotide
tgccgaaagtttagctcaacctgcatttataaggctcccaaacctaaagacatttgtcggttatggtgacttcccgcaacacattgcgacatgcaaatactgcggagtgcaccccctcccctggcaactcctcgctgggacgcacgcgcgctgcgtgctcccgccttttgactgcgccggcgatacttgggagagggttgatgacgtcagcgttctggctcc

SEQ ID NO: 1001 - DNA, 222 bp, Artificial Sequence
  Description of Artificial Sequence: Synthetic polynucleotide
tgccgaaaatttagctcaagccgcatttataaggctcccaaacctaaatacatttgtcggttatggtgacttcccgcaacacattgcgacatgcaaatactgcggagcgtaccccctcccctggcaactcctcgctgggacgcacgcgcgctacgtgctcccgccttttgactgcgccggcgatacttgggagagggttgatgacgtcagcgttctggctcc

SEQ ID NO: 1002 - DNA, 219 bp, Artificial Sequence
  Description of Artificial Sequence: Synthetic polynucleotide
cgccgaaaaccaggctcaagccacatttataaggctcccaaagcgaaatacatttgtcggttatggtgacttcccgcaacacattgcgacatgcaaatactgcggagcgttcctcccctggcaactcctcgctgggacgcacgcgcactacgtgctcccgccttttgactgcgccggcgatacttgggagagagttgatgacgtcagcgttctggctcc

SEQ ID NO: 1003 - DNA, 219 bp, Artificial Sequence
  Description of Artificial Sequence: Synthetic polynucleotide
cgccgaaaaccaggctcaagccacatttataaggctcccaaaccgaaatacatttgtcggttatggtgacttcccgcaacacattgcgacatgcaaatactgcggagcgttcctcccctggcaactcctcgctgggacgcacgcgcactacgtgctcccgccttttgactgcgccggcgatacttgggagagggttgatgacgtcagcgttctggctcc

SEQ ID NO: 1004 - DNA, 219 bp, Artificial Sequence
  Description of Artificial Sequence: Synthetic polynucleotide
cgccgaaaaccaggctcaagccacatttataaggctcgcaaaccgaaatacatttgtcggttatggtgacttcccgcaacacattgcgacatgcaaatactgcggagcgttcctcccctggcaactcctcgctgggacgcacgcgcactacgtgctcccgccttttgactgcgccggcgatacttgggagagggttgatgacgtcagcgttctggctcc

SEQ ID NO: 1005 - DNA, 219 bp, Artificial Sequence
  Description of Artificial Sequence: Synthetic polynucleotide
cgccgaaaaccaggctcaagccacatttataaggctcccaaacctaagtacatttgtcggttatggtgacttcccgcaacacattgcgacatgcaaatactgcggagcgtccctcccctggcaactcctcgctgggacgcacgcgcgctacgtgctcccgccttttgactgcgccggcgatacttgggagagggttgatgacgtcagcgttctggctcc

SEQ ID NO: 1006 - DNA, 219 bp, Artificial Sequence
  Description of Artificial Sequence: Synthetic polynucleotide
cgccgaaaaccaggctcaagccacatttataaggctcccaaacctaagtacatttgtcggttatggtgacttcccgcaacacattgcgacatgcaaatactgcggagcgttcctcccctggcaactcctcgctgggacgcacgcgcgctacgtgctcccgccttttgactgcgccggcgatacttgggagagggttgatgacgtcagcgttctggctcc

SEQ ID NO: 1007 - DNA, 219 bp, Artificial Sequence
  Description of Artificial Sequence: Synthetic polynucleotide
cgccgaaaaccaggctcaagccacatttataaggctcccaaacctaaatacatttgtcggttatggtgacttcccgcaacacattgcgacatgcaaatactgcggagcgttcctcccctggcaactcctcgctgggacgcacgcgcgctacgtgctcccgccttttgactgcgccggcgatacttgggagagggttgatgacgtcagcgttctggctcc

SEQ ID NO: 1008 - DNA, 219 bp, Artificial Sequence
  Description of Artificial Sequence: Synthetic polynucleotide
tgccgaaaacctagctcaagccacatttataaggctcccaaacctaaatacatttgtcggttatggtgacttcccgcaacacattgcgacatgcaaatactgcggagcgtacctcccctggcaactcctcgctgggacgcacgcgcgctacgtgctcccgccttttgactgcgccggcgatacttgggagagggttgatgacgtcagcgttctggctcc

SEQ ID NO: 1009 - DNA, 219 bp, Artificial Sequence
  Description of Artificial Sequence: Synthetic polynucleotide
cgccgaaaaccaggctcaagccacatttataaggctcccaaacctaaatacatttgtcggttatggtgacttcccgcaacacattgcgacatgcaaatactgcggagcgtacctcccctggcaactcctcgctgggacgcacgcgcgctacgtgctcccgccttttgactgcgccggcgatacttgggagagggttgatgacgtcagcgttctggctcc

SEQ ID NO: 1010-1099 - skipped (90 entries)

SEQ ID NO: 1100 - DNA, 219 bp, Artificial Sequence
  Description of Artificial Sequence: Synthetic polynucleotide
cgccgaaagccaggctcaagccacatttataaggctcccaaacctaaatacatttgtcggttatggtgacttcccgcaacacattgcgacatgcaaatactgcggagcgtacctcccctggcaactcctcgctgggacgcacgcgcgctacgtgctcccgccttttgactgcgccggcgacacttgggagagggttgatgacgtcagcgttctggctcc

SEQ ID NO: 1101 - DNA, 222 bp, Artificial Sequence
  Description of Artificial Sequence: Synthetic polynucleotide
tggcaaaaactgagctcaagccgcatttataaggctcccaaacctaaagacatttgtcggttatggtgacttcccgcaacacattgcgacatgcaaatactgcggagcgtaccccctcccctggcaactcctcgctgggacgcacgcgcgctacgtgctcccgccttttgactgcgccggcgatacttgggagagggttgatgacgtcagcgttctggctcc

SEQ ID NO: 1102 - DNA, 222 bp, Artificial Sequence
  Description of Artificial Sequence: Synthetic polynucleotide
tgccgaaaacttagctcaagccgcatttataaggctcccaaacctaaatacatttgtcggttatggtgacttcccgcaacacattgcgacatgcaaatactgcggagcgtaccccctcccctggcaactcctcgctgggacgcacgcgcgctacgtgctcccgccttttgactgcgccggcgatacttgggagagggttgatgacgtcagcgttctggctcc

SEQ ID NO: 1103 - DNA, 219 bp, Artificial Sequence
  Description of Artificial Sequence: Synthetic polynucleotide
tgccgaaaacttagctcacgccgcacttataaggctcccaaacctaaatacatttgtaggttatggtgacttcccgcaacacattgcgacatgcaaatactgcggagcgtacctcccctggcaactcctcgctgggacgcacgcgcgctacgtgctcccgccttttgactgagccggcgatacttgggagagggttgatgacgtcagcgttctggctcc

SEQ ID NO: 1104 - DNA, 218 bp, Artificial Sequence
  Description of Artificial Sequence: Synthetic polynucleotide
tgccgaaagcttaccttcgcccgccttataaggctcccaaacctaaatacatttgtaggttatggtgacttcccgcaacacattgcgacatgcaaatactgcggagcgtacctcccctggaaactcctcgctgggacgcacgcgcgttacgtgctcccgccttttgactgagccggcgatacttgggagagggttgatgacgtcagcgttctggctcc

SEQ ID NO: 1105 - DNA, 230 bp, Artificial Sequence
  Description of Artificial Sequence: Synthetic polynucleotide
tgggaaagggtggccccgccgagcatttataagactcccatacctaaagacatttctcagttatggtgatttccctacaacacacagcaacatgcaaatatcgaggggtgtaccgcccctgtcctttgtagacgtcttctctccaggacgcacgcgcgctgtattcccgccttgtgactctaggcgggcgattcctgggagagggttgatgacgtccaagttctggcttc

SEQ ID NO: 1106 - DNA, 230 bp, Artificial Sequence
  Description of Artificial Sequence: Synthetic polynucleotide
tgggaaagggtggccccgccgagcatttataagactcccatacctaaagacatttctcagttatggtgacttccctacaacacacagcaacatgcaaatatcgaggggtgtaccgcccctgtcctttgtagacgtcttctctccaggacgcacgcgcgctgtattcccgccttgtgactctaggcgggcgattcctgggagagggttgatgacgtccaagttctggcttc

SEQ ID NO: 1107 - DNA, 227 bp, Artificial Sequence
  Description of Artificial Sequence: Synthetic polynucleotide
tgggaaagggtggctccgccgagcatttataagactcccatacctaaagacatttctcagttatggtgacttcccacaacgcacagcaacatgcaaatatcgaggggtgtaccgcccctgtcctttgtagacgtcttctctccaggacgcacgcgcgctgtattcccgccttgtgactaggcgggcgattcctgggagagggttgatgacgcccaagttctggcttc

SEQ ID NO: 1108 - DNA, 227 bp, Artificial Sequence
  Description of Artificial Sequence: Synthetic polynucleotide
tgggaaagggtggccccgccgagcatttataagactcccatacctaaagacatttctcagttatggtgacttcccacaacacacagcaacatgcaaatatcgaggggtgtaccgcccctgtcctttgtagacgtcttctctccaggacgcacgcgcgctgtattcccgccttgtgactaggcgggcgattcctgggagagggttgatgacgtccaagttctggcttc

SEQ ID NO: 1109 - DNA, 229 bp, Artificial Sequence
  Description of Artificial Sequence: Synthetic polynucleotide
tgggaaaggggggctccgctgagcgtttataaggctcccatacctaaagacatttcacagttatggtgacttcccacaacacacagcaacatgcaaatacagaggggtgtaccgcccctgtcctttgtagacgtcttctcgccaggacgcacgcgcgctgtgttcccgccttgtgactctaggcgggcgattcctgggagagggttgatgacgtccaagttctgactcc

SEQ ID NO: 1110 - DNA, 229 bp, Artificial Sequence
  Description of Artificial Sequence: Synthetic polynucleotide
tgggagagggaggttccgctgagcgtttataaggctcccatatctaaagacatttcacagttatggtgacttcccacaacacacagcaacatgcaaatacagagaagcgtaccacccctgtcctttgcagacgtcttctagccaggacgcacgcgcactgtgttcccgccttgtgactcgaggcgggcgatacctgggagagggttgatgacgtccaagttctgactcc

SEQ ID NO: 1111 - DNA, 230 bp, Artificial Sequence
  Description of Artificial Sequence: Synthetic polynucleotide
tgggaaagggtggctccgccgagcatttataaggctcccatacctaaagacatttctcagttatggtgacttccctacaacacacagcaacatgcaaatatcgaggggtgtaccgcccctgtcctttgtagacgtcttctcgccaggacgcacgcgcgctgtgttcccgccttgtgactctaggcgggcgattcctgggagagggttgatgacgtccaagttctgactcc

SEQ ID NO: 1112 - DNA, 230 bp, Artificial Sequence
  Description of Artificial Sequence: Synthetic polynucleotide
tgggaaagggtggctccgccgagcatttataaggctcccatacctaaagacatttctcagttatggtgacttccctacaacacacagcaacatgcaaatatcgaggggtgtaccgcccctgtcctttgtagacgtcttctctccaggacgcacgcgcgctgtgttcccgccttgtgactctaggcgggcgattcctgggagagggttgatgacgtccaagttctgactcc

SEQ ID NO: 1113 - DNA, 229 bp, Artificial Sequence
  Description of Artificial Sequence: Synthetic polynucleotide
caggcaaaagcagttcggccgagaatttataaggctccaatacctaaagacatttctcagttacggtgacttcccacaacacacagcaacatgcaaatatcgagaggtgtaccgcccctgtcctttgtagacgtcttctcttcgggacgcacgcgcgctgtgttcccgccttatgactctaggcgggcgattcctgggagagggttgatgacgtccaagttctgactcc

SEQ ID NO: 1114 - DNA, 229 bp, Artificial Sequence
  Description of Artificial Sequence: Synthetic polynucleotide
caggcaaaagcaattcggccgagaatttataaggctccaatacctaaagacatttctcagttacggtgacttcccacaacacacagcaacatgcaaatatcgagaggtgtaccgcccctgtcctttgtagacgtcttctcttcgggacgcacgcgcgctgtgttcccgccttatgactctaggcgggcgattcctgggagagggttgatgacgtccaagttctgactcc

SEQ ID NO: 1115 - DNA, 230 bp, Artificial Sequence
  Description of Artificial Sequence: Synthetic polynucleotide
tgggaaaaggtggctccacagagcatttataaggctcccatacctaaagacatttctcagttatggtgacttccctacaacacacagcaacatgcaaatatcgaggggtgtaccgcccctgtcctttgtagacgtcttctcgccaggacgcacgcgcgctgtgttcccgccttgtgactctaggcgggcgattcctgggagagggttgatgacgtccaagttctgactcc

SEQ ID NO: 1116 - DNA, 230 bp, Artificial Sequence
  Description of Artificial Sequence: Synthetic polynucleotide
tgggaaagggtggccccacagagcatttataaggctcccatacctaaagacatttctcagttatggtgacttcccacaacgcatagcaacatgcaaatatcgcggggagtacctcccctgtcccttgtacgcgtcttctcaggacgcacgcacgcgcgctgtgttcccgccctgtgactccaggcgggcaattcccgggagagggttgctgacgggaacgttcaggctcc

SEQ ID NO: 1117 - DNA, 229 bp, Artificial Sequence
  Description of Artificial Sequence: Synthetic polynucleotide
tgggaaagggtggtcctgaggcggatttataaggctcccacatctaaaggcatttcacagtcatggtgacttcccacaatacatagcaacatgcaaatttcgcggggagtacctcccctgtcccttgtacgcggcttctcaggacgcacgcacgcgctctgtgttcccgccctgtgactctaggagggcaattcctgggacagtgttctgacgggaacgttcaggctcc

SEQ ID NO: 1118 - DNA, 229 bp, Artificial Sequence
  Description of Artificial Sequence: Synthetic polynucleotide
tgggaaagggtggtcctgaggcggatttataaggctcccatatctaaaggcatttcacagtcatggtgacttcccacaatacatagcaacatgcaaatttcgcggggagtacctcccctgtcccttgtacgcggcttctcaggacgcacgcacgcgctctgtgttcccgccctgtgactctaggagggcaattcctgggacagtgttctgacgggaacgttcaggctcc

SEQ ID NO: 1119 - DNA, 229 bp, Artificial Sequence
  Description of Artificial Sequence: Synthetic polynucleotide
tgggaaaaggtggtcctggggcggatttataaggctcccatatctaaaggcatttcacagtcatggtgacttcccacaatacatagcaacatgcaaatatcgcggggagtacctcccctgtcccttgtacgcggcttctcaggacgcacgcacgcgctctgtgttcccgccctgtgactctaggcgggcaattcctgggacagtgttctgacgggaacgttcaggctcc

SEQ ID NO: 1120 - DNA, 230 bp, Artificial Sequence
  Description of Artificial Sequence: Synthetic polynucleotide
tggaaaagagtggccccagagagcatttataaggctcccgcacctaaatgcatttatcagttatggtgacttcccacaatacatagcaacatgcaaatatagcggggagtacctcccctgtcccttgtccgtgtcttctcaggacgcacgcacgcgcgctgtgttcccgccctgtgactctaagcgggcaattcctggaagaggcttgctgacgggaacgttcaggctcc

SEQ ID NO: 1121 - DNA, 230 bp, Artificial Sequence
  Description of Artificial Sequence: Synthetic polynucleotide
tgggaaagagtggccccagagagcatttataaggctcccgcacctaaatgcatttatcagttatggtgacttcccacaatacatagcaacatgcaaatatagcggggagtacctcccctgtcccttgtacgtgtcttctcaggacgcacgcacgcgcgctgtgttcccgccctgtgactctaagcgggcaattcctggaagaggcttgctgacgggaacgttcaggctcc

SEQ ID NO: 1122 - DNA, 230 bp, Artificial Sequence
  Description of Artificial Sequence: Synthetic polynucleotide
tgggaaagggtggccccagagagcatttataaggctcccgcacctaaatgcatttatcagttatggtgacttcccacaatacatagcaacatgtaaatatcgcggggagtacctcccctgtcccttgtacgtgtcttctcaggacgcacgcacgcgcgctgtgttcccgccctgtgactctaggcgggcaattcctggaagaggcttgctgacgggaacgttcaggctcc

SEQ ID NO: 1123 - DNA, 230 bp, Artificial Sequence
  Description of Artificial Sequence: Synthetic polynucleotide
tgggaaagggtggccccagagagcatttataaggctcccgcacctaaatgcatttatcagttatggtgacttcccacaatacatagcaacatgcaaatatcgcggggagtacctcccctgtcccttgtacgtgtcttctcaggacgcacgcacgcgcgctgtgttcccgccctgtgactctaggcgggcaattcctggaagaggcttgctgacgggaacgttcaggctcc

SEQ ID NO: 1124 - DNA, 230 bp, Artificial Sequence
  Description of Artificial Sequence: Synthetic polynucleotide
tgggaaacggtggccccaaagagcacttataaagccccctcacctaaatgcatttatcagttatggtgacttcccacaatacatagcaacatgcaaatatcgcggggagtacctcccctgtcccttgtacgtgtcttctcaggacgcacgcacgcgcgctgtgttcccgccctgtgactctaggtggacaattcctgggggaggcttgctgacgggaacgttccggctcc

SEQ ID NO: 1125 - DNA, 230 bp, Artificial Sequence
  Description of Artificial Sequence: Synthetic polynucleotide
tgggaaacggtggccccaaagagcatttataaagctccctcacctaaatgcatttatcagttatggtgacttcccacaatacatagcaacatgcaaatatcgcggggagtacctcccctgtcccttgtacgtgtcttctcaggacgcacgcacgcgcgctgtgttcccgccctgtgactctaggcgggcaattcctggaagaggcttgctgacgggaacgttccggctcc

SEQ ID NO: 1126 - DNA, 230 bp, Artificial Sequence
  Description of Artificial Sequence: Synthetic polynucleotide
tgggaaagggtggccccagcgagcatttataaggctcccgcatctaaagacattttacagttatggtgacttcccacaacgcgtagcaacatgcaaatatcgcagggagtaccgcccctgtcccttgtacgcgtcttctcagcacgcacgcacgcgcgctgtgttcccgccctgtgactccaggcgggtatttcccggggcgggtttgctgacaagaacgttcaggctcc

SEQ ID NO: 1127 - DNA, 230 bp, Artificial Sequence
  Description of Artificial Sequence: Synthetic polynucleotide
tgggaaagggtgggcccagcgagcatttataaggctcccgcatctaaagacattttacaattatggtgacttcccacaacgcgtagcaacatgcaaatatcgcagggagtaccgcccctgtcccttgtacgcgtcttctcagcacgcacgcacgcgcgctgtgttcccgccctgtgactccaggcgggtatttcccggggcgggtttgctgacaagaacgttcaggctcc

SEQ ID NO: 1128 - DNA, 230 bp, Artificial Sequence
  Description of Artificial Sequence: Synthetic polynucleotide
tgggaaagggtggccccagagagcatttataaggctcccgcacctaaaggcatttaacagttatggtgacttcccacaacgcgtagcaacatgcaaatatcgcagggagtaccgcccctgtcccttgtacgcatcttctcaggacgcacgcacgcgcgctgtgttcccgccctgtgactccaggcgggcatttcccggggcgggtttgctgacaggaacgttcaggctcc

SEQ ID NO: 1129 - DNA, 231 bp, Artificial Sequence
  Description of Artificial Sequence: Synthetic polynucleotide
tgggaaaaggtggccccacagagcatttataaggctcccatacctaaagacatttctcagttatggtgacttccctacaatacatagcaacatgcaaatatcgcggggcgtacctcccctgtcccttgtaggcgtcttctcagccaggacgcacgcgcgctgtgttcccgccctgtgactctaggcgggcgattcctgggagagggttgatgacgtcaacgttcgggctcc

SEQ ID NO: 1130 - DNA, 230 bp, Artificial Sequence
  Description of Artificial Sequence: Synthetic polynucleotide
tgggaaagggtggccccagagagcatttataaggctcccatacctaaaggcatttctcagttatggtgacttcccacaacgcatagcaacatgcaaatatcgcggggagtacctcccctgtcccttgtacgcgtcttctcaggacgcacgcacgcgcgctgtgttcccgccctgtgactccaggcgggcaattcccgggagagggttgctgacgggaacgttcaggctcc

SEQ ID NO: 1131 - DNA, 230 bp, Artificial Sequence
  Description of Artificial Sequence: Synthetic polynucleotide
tgggaaagggtggccccagagagcatttataaggctcccgcacctaaaggcattttacagttatggtgacttcccacaacgcgtagcaacatgcaaatatcgcggggagtaccgcccctgtcccttgtacgcgtcttctcaggacgcacgcacgcgcgctgtgttcccgccctgtgactccaggcgggcaattcccggggcgggtttgctgacgggaacgttcaggctcc

SEQ ID NO: 1132 - DNA, 230 bp, Artificial Sequence
  Description of Artificial Sequence: Synthetic polynucleotide
tgggaaagggtggccccagagagcatttataaggctcccatacctaaaggcatttctcagttatggtgacttcccacaatacatagcaacatgcaaatatcgcggggagtacctcccctgtcccttgtacgcgtcttctcaggacgcacgcacgcgcgctgtgttcccgccctgtgactctaggcgggcaattcctgggagagggttgctgacgggaacgttcaggctcc

SEQ ID NO: 1133 - DNA, 230 bp, Artificial Sequence
  Description of Artificial Sequence: Synthetic polynucleotide
tgggaaagggtggccccagcgagcatttataaggctcccgcatctaaagacattttacagttatggtgacttcccacaacgcgtagcaacatgcaaatatcgcagggagtaccgcccctgtcccttgtacgcgtcttctcaggacgcacgcacgcgcgctgtgttcccgccctgtgactccaggcgggtatttcccggggcgggtttgctgacaggaacgttcaggctcc

SEQ ID NO: 1134 - DNA, 230 bp, Artificial Sequence
  Description of Artificial Sequence: Synthetic polynucleotide
tgggaaagggtggccccagcgagcatttataaggctcccgcatctaaagacattttacagttatggtgacttcccacaacgcgtagcaacatgcaaatatcgcagggagtaccgcccctgtcccttgtacgcgtcttctcagcacgcacgcacgcgcgctgtgttcccgccctgtgactccaggcgggtatttcccggggcgggtttgctgacaggaacgttcaggctcc

SEQ ID NO: 1135 - DNA, 230 bp, Artificial Sequence
  Description of Artificial Sequence: Synthetic polynucleotide
tgggaaagggtggccccaccgagcatttataaggctcccgcatctaaagacattttacagttatggtgacttcccacaacgcgtagcaacatgcaaatatcgcggagagtaccgcccctgtcccatgcacgcgtcttctcagcacgcacgcacgcgcgctgtgttcccgccctgtgactccaggcgggtatttccaggggcgggtttgctgacaggaacgttcaggcttc

SEQ ID NO: 1136 - DNA, 230 bp, Artificial Sequence
  Description of Artificial Sequence: Synthetic polynucleotide
tgggaaaaggtggccccagagagcatttataaggctcccatacctaaaggcatttctcagttatggtgacttcccacaatacatagcaacatgcaaatatcgcggggagtacctcccctgtcccttgtacgcgtcttctcaggacgcacgcacgcgcgctgtgttcccgccctgtgactctaggcgggcaattcctgggagagggttgctgacgggaacgttcaggctcc

SEQ ID NO: 1137 - DNA, 270 bp, Artificial Sequence
  Description of Artificial Sequence: Synthetic polynucleotide
tgggaaaaagtggggcctcacgcagcatttataaggctcccatacctaaagacatttcacggttatggtgacttcccccacaatacatagcgacatgcaaatatcatggtccttccgcggggcgtgcctccccctgtcccttggcccgtaggcgtcttctcagccaggagacgcacgcggcgcgctgcgtgttcccgccctgtgacttctaggcgggcgattccctgggagagggttggatgacgtcagcatcgccaacgttcgggctcc

SEQ ID NO: 1138 - DNA, 233 bp, Artificial Sequence
  Description of Artificial Sequence: Synthetic polynucleotide
tgggaaaaggtgggcccacgcagaatttataaggctcccatacctaaagacattttacgattatggtgacttcccacaatacatagcgacatgcaaatatcgcggggcgtgcctcccctgtcccgtcacaggcgtcttctcagccagggcgcacgcgcgctgcgtgttcccgccctgtgactctgggcccgcgattcctgggagcgggttgatgacgtcagcgttcgggctcc

SEQ ID NO: 1139 - DNA, 231 bp, Artificial Sequence
  Description of Artificial Sequence: Synthetic polynucleotide
tgggaaagggtggacccaccgagcatttataaggctcccgcatctaaagacattttacagttatggtgacttcccacaacgcgtagcaacatgcaaatatcgtggagagtaccgcccctgtcccatgcacgcgtcttctcagcacgcacgcacgcgcgctgtgtttcccgccctgtgactccaggcgggtatttccaggggcgggtttgctgacaggaacgttcaggcttc

SEQ ID NO: 1140 - DNA, 249 bp, Artificial Sequence
  Description of Artificial Sequence: Synthetic polynucleotide
tgggaaaaggtgggcccacgcagaatttataaggctcccatacctaaagacatttcacgattatggtgacttcccacaatacatagcgacatgcaaatatcgcggggcgtgcctccccctgtcccgtaccccacaggcgtcttctcagccagggcgcacgcgcgctgcgtgttcccgccctgagtgactagggattctgggcccgcgattcccgtgggagcgggttgatgacgtcagcgttcgggctcc

SEQ ID NO: 1141 - DNA, 248 bp, Artificial Sequence
  Description of Artificial Sequence: Synthetic polynucleotide
tgggaaaaggtgggcccacgcagaatttataaggctcccatacctaaagacatttcacgattatggtgacttcccacaatacatagcgacatgcaaatatcgcggggcgtgcctcccctgtcccgtaccccacaggcgtcttctcagccagggcgcacgcgcgctgcgtgttcccgccctgagtgactagggattctgggcccgcgattcccgtgggagcgggttgatgacgtcagcgttcgggctcc

SEQ ID NO: 1142 - DNA, 237 bp, Artificial Sequence
  Description of Artificial Sequence: Synthetic polynucleotide
tgggaaaaggtgggcccacgcagaatttataaggctcccatacctaaagacattttacgattatggtgacttcccacaatacatagcgacatgcaaatatcgcggggcgtgcctcccctgtcccgtcacaggcgtcttctcagccagggcgcacgcgcgctgcgtgttcccgccctgagtgactctgggcccgcgattcccgtgggagcgggttgatgacgtcagcgttcgggctcc

SEQ ID NO: 1143 - DNA, 232 bp, Artificial Sequence
  Description of Artificial Sequence: Synthetic polynucleotide
tgggaaaaggtgggcccacggagaatttataaggctcccatacctaaagacattttacgattatggtgacttcccacaacacatagcgacatgcaaatatcgcggggcgtgcctcccctgtcccgtacaggcgtcttctcagccagggcgcacgcgcgctgcgtgttcccgccctgtgactccgggcccgcgattcctgggagcgggttgatgacgtcagcgttcgggctcc

SEQ ID NO: 1144 - DNA, 230 bp, Artificial Sequence
  Description of Artificial Sequence: Synthetic polynucleotide
tgggaaagggtggccccagagagcatttataaggctcccgcacctaaaggcattttacagttatggtgacttcccacaacgcgtagcaacatgcaaatatcgcagggagtaccgcccctgtcccttgtacgcgtcttctcaggacgcacgcacgcgcgctgtgttcccgccctgtgactccaggcgggcatttcccggggcgggtttgctgacaggaacgttcaggctcc

SEQ ID NO: 1145 - DNA, 230 bp, Artificial Sequence
  Description of Artificial Sequence: Synthetic polynucleotide
tgagaaagggtggctccacagagcatttataaggctcccatacctaaagacatttctcagttatggtgacttcccacaacgcatagcaacatgcaaatatcgcggggagtacctcccctgtcccttgtacgcgtcttctcaggacgcacgcacgcgcgctgtgttcccgccctgtgactccaggcgggcaattctcgggagggggttgctgacgggaacgttcaggctcc

SEQ ID NO: 1146 - DNA, 228 bp, Artificial Sequence
  Description of Artificial Sequence: Synthetic polynucleotide
tggggaaaaacagctcacggcggcatttataagactcacagatctaaagccatttcacgaatagggtgacttcccacaatacacagcgacatgcaaacatagcggggcgtgcctttcctgtaccctgtgggcatctctcctggacgcacgcgcgccgggtgttcccgcgctgtgactctaggcaagcgcttcctgggagagagttgatgacggcagcattcgggctcc

SEQ ID NO: 1147 - DNA, 232 bp, Artificial Sequence
  Description of Artificial Sequence: Synthetic polynucleotide
tggggaaaagcgggctccaggcagcatttataagactcacatatctaaagacatttcacggttagggtgacttcccacaatacacagcgacatgcaaatatcgcggggcgtgcctcccctgtcccttgtgggcatcttctcgcctggacgcacgcgcgccgcgtgttcccgccctgtgactctaggcgggcgattcctgggagagggttgatgacgtcaacattcgggctcc

SEQ ID NO: 1148 - DNA, 232 bp, Artificial Sequence
  Description of Artificial Sequence: Synthetic polynucleotide
cggagcaaacaggccaccaggcagcctttataagactcacatatctaaagacatttcacagttagggtgacttcccacagtacacagcgatatgcaaatatcgcggagcgtgcctccccagtctctggcgggcatcttctcgcctacacgcacgcgcgccgcgtgttcccgccctgtgacgctaggcgggccattcatgggagagggttgatgacgtcaacattcggactcc

SEQ ID NO: 1149 - DNA, 232 bp, Artificial Sequence
  Description of Artificial Sequence: Synthetic polynucleotide
tggagaaaagcgggctccaggcagcatttataagactcacatatctaaagacatttcacagttagggtgacttcccacaatacacagcgacatgcaaatatcgcggagcgtgcctcccctgtctcttgtgggcatcttctcgcctggacgcacgcgcgccgcgtgttcccgccctgtgacgctaggcgggcgattcctgggagagggttgatgacgtcaacattcgggctcc

SEQ ID NO: 1150 - DNA, 269 bp, Artificial Sequence
  Description of Artificial Sequence: Synthetic polynucleotide
tgggaaaaagaggggcttcacgcagcatttataaggctcccatatctaaagacatttcacggttagggtgacttcccccacaatacatagcgacatgcaaatatcatggtccttccgcggggcgtgcctccccctgtcccttggcccgtgggcatcttctcgccaggagacgcacgcggcgcgctgcgtgttcccgccctgtgacttctaggcgggcgattccctgggagagggttggatgacgtcagcatcgccaacattcgggctcc

SEQ ID NO: 1151 - DNA, 231 bp, Artificial Sequence
  Description of Artificial Sequence: Synthetic polynucleotide
tgaagaaaggcggctctaagcagcatttataagactcacatatctgaagacatttcacagttagggtgacttcccacaagacacagcgacatgcaaatatcgcggaatgtgcttcccctgtctcctgtgggcatcttctcgcctggacgcacgcgcaccgcgtgttcccgccctgtgacgctaggcgggcgattcctgggagagggttgatgacgtcaacactcgggctcc

SEQ ID NO: 1152 - DNA, 231 bp, Artificial Sequence
  Description of Artificial Sequence: Synthetic polynucleotide
tgggaaagggtggtcccatacagaacttataagattcccatatccaaagacatttcacgtttatggtgatttcccagaacacatagcgacatgcaaatattgcagggcgccactcccctgtccctcacagccatcttcctgccagggcgcacgcgcgctgggtgttcccgcctagtgacactgggcccgcgattccttggagcgggttgatgacgtcagcgttcgaattcc

SEQ ID NO: 1153 - DNA, 231 bp, Artificial Sequence
  Description of Artificial Sequence: Synthetic polynucleotide
tgggaaagggtggtcccacacagaacttataagactcccatatccaaagacatttcacgtttatggtgatttcccagaacacatagcgacatgcaaatattgcagggcgccactcccctgtccctcacagccatcttcctgccagggcgcacgcgcgctgggtgttcccgcctagtgacactgggcccgcgattccttggagcgggttgatgacgtcagcgttcgaattcc

SEQ ID NO: 1154 - DNA, 231 bp, Artificial Sequence
  Description of Artificial Sequence: Synthetic polynucleotide
tggggaagggtggtcccatacagaacttataagattcccatacccaaagacatttcacgtttatggtgacttcccagaagacatagcgacatgcaaatattgcagggcgtcactcccctgtccctcacagccatcttcctgccagggcgcacgcgcgctgggtgttcccgcctagtgacactgggcccgcgattccttggagcgggttgatgacgtcagcgttcgaattcc

SEQ ID NO: 1155 - DNA, 233 bp, Artificial Sequence
  Description of Artificial Sequence: Synthetic polynucleotide
tggggaagggtggtcccatacagaacttataagattcccatacccaaagacatttcacgtttatggtgacttcccagaagacatagcgacatgcaaatattgcagggcgtcactccccctgtccctcaacagtcatcttcctgccagggcgcacgcgcgctgggtgttcccgcctagtgacactgggcccgcgattccttggagcgggttgatgacgtcagcgttcgaattcc

SEQ ID NO: 1156 - DNA, 231 bp, Artificial Sequence
  Description of Artificial Sequence: Synthetic polynucleotide
tgggaaagggtggtcccatacagaacttataagattcccatacccaaagacatttcacgtttatggtgacttcccagaacacatagcgacatgcaaatattgcagggcgtcactcccctgtccctcacagccatcttcctgccagggcgcacgcgcgctgggtgttcccgcctagtgacactgggcccgcgattccttggagcgggttgatgacgtcagcgttcgaattcc

SEQ ID NO: 1157 - DNA, 232 bp, Artificial Sequence
  Description of Artificial Sequence: Synthetic polynucleotide
tggggaaaggtggtcccatacagaacttataagattcccatactcaaagacatttcacgtttatggtgacttcccagaagacacagcgacatgcaaatattgtagggcgtcacaccccctgtccctcacagtcatcttcctgccagggcgcacgcgcgctgggtgttcccgcgtagtgacactgggcccgcgattccttggagcgggttgatgacgtcagcgttcgaattcc

SEQ ID NO: 1158 - DNA, 231 bp, Artificial Sequence
  Description of Artificial Sequence: Synthetic polynucleotide
tggggaaaggtggtcccacacagaacttataagattcccatactcaaagacatttctcgtttatggtgacttcccagaagacacagcgacatgcaaatattgtagggcgtcacacccctgtccctcacagtcatcttcctgccagggcgcacgcgcgctgggtgttcccgcgtagtgacactgggcccgcgattccttggagcgggttgatgacgtcagcgttcgaattcc

SEQ ID NO: 1159 - DNA, 233 bp, Artificial Sequence
  Description of Artificial Sequence: Synthetic polynucleotide
tggggaagggtggtcccatacagaacttataagattcccatactcaaagacatttcacgtttatggtgacttcccagaagacatagcgacatgcaaatattgcagggcgtcacaccccctgtccctcaacagtcatcttcctgccagggcgcacgcgcgctgggtgttcccgcgtagtgacactgggcccgcgattccttggagcgggttgatgacgtcagcgttcgaattcc

SEQ ID NO: 1160 - DNA, 232 bp, Artificial Sequence
  Description of Artificial Sequence: Synthetic polynucleotide
tggggaagggtggtcctacacagaacttataagactcccatactcaaagacatttcacgtttatggtgacttcccagaagacatagcgacatgcaaatattgcagggcgtcacaccccctgtcccttacagccatcttcctgccagggcgcacgcgcgctgggtgttcccgcgtagtgacactgggcccgcgattccttggagcgggttgatgacgtcagcgttcgaattcc

SEQ ID NO: 1161 - DNA, 233 bp, Artificial Sequence
  Description of Artificial Sequence: Synthetic polynucleotide
tggggaagggtggtcctacacagaacttataagactcccatactcaaagacatttcacgtttatggtgacttcccagaagacatagcgacatgcaaatattgcagggcgtcacaccccctgtcccttaacagtcatcttcctgccagggcgcacgcgcgctgggtgttcccgcgtagtgacactgggcccgcgattccttggagcgggttgatgacgtcagcgttcgaattcc

SEQ ID NO: 1162 - DNA, 232 bp, Artificial Sequence
  Description of Artificial Sequence: Synthetic polynucleotide
tggggaagggtggtcccatacagaacttataagattcccatactcaaagacatttcacgtttatggtgacttcccagaagacatagcgacatgcaaatattgcagggcgtcacaccccctgtccctcacagtcatcttcctgccagggcgcacgcgcgctgggtgttcccgcgtagtgacactgggcccgcgattccttggagcgggttgatgacgtcagcgttcgaattcc

SEQ ID NO: 1163 - DNA, 233 bp, Artificial Sequence
  Description of Artificial Sequence: Synthetic polynucleotide
tggggaagggtggtcccacacagaacttataagattcccatacccaaagacatttcacgattatggtgacttcccagaagacatagcgacatgcaaatattgcagggcgtgcctccccctgtccctcaacagtcgtcttcctgccagggcgcacgcgcgctgggtgttcccgcctagtgacactgggcccgcgattccttggagcgggttgatgacgtcagcgttcgaattcc

SEQ ID NO: 1164 - DNA, 230 bp, Artificial Sequence
  Description of Artificial Sequence: Synthetic polynucleotide
tggggaagggtggtcctacacagaacttataagattcccatacccaaagacatttcacgattatggtgacttcccagaagacacagcgacatgcaaatattgcaggtcgtgcctcgcctgtccctcacagtcgtcttcctgccagggcgcacgcgcgctgggtgtcccgccaactgacactgggctcgcgattccttggagcgggttgatgacgtcagcgttcgaattcc

SEQ ID NO: 1165 - DNA, 230 bp, Artificial Sequence
  Description of Artificial Sequence: Synthetic polynucleotide
tggggaagggtggtcccacacagaacttataagattcccatacccaaagacatttcacgattatggtgacttcccagaagacacagcgacatgcaaatattgcaggtcgtgcctcgcctgtccctcacagtcgtcttcctgccagggcgcacgcgcgctgggtttcccgccaactgacactgggctcgcgattccttggagcgggttgatgacgtcagcgttcgaattcc

SEQ ID NO: 1166 - DNA, 230 bp, Artificial Sequence
  Description of Artificial Sequence: Synthetic polynucleotide
tggggaagggtggtcctacgcagaacttataagattcccatacccaaagacatttcacgattatggtgacttcccagaatacacagcgacatgcaaatattgcaggtcgtgcctcgcctgtccctcacagtcgtcttcctgccagggcgcacgcgcgctgggtgtcccgccaactgacactgggctcgcgattccttggagcgggttgatgacgtcagcgttcgaattcc

SEQ ID NO: 1167 - DNA, 238 bp, Artificial Sequence
  Description of Artificial Sequence: Synthetic polynucleotide
tgaggaaaaatggttccacacagaatttataaggttcccaaatctaaagacatttcaccattatggtgatttcccacaacacatagcgacatgcaaatatctcagagcgtacctcccctgtcctatacgggcgtcaactcgccagggcgcacgcgcgctgtgtgtttcccgcctgtgactcgggactctgggcccgcgattcctcggagcgggttgagaacgtcagctccggtgcttc

SEQ ID NO: 1168 - DNA, 238 bp, Artificial Sequence
  Description of Artificial Sequence: Synthetic polynucleotide
tgaggaaaagtggttccacacagaatttataaggttcccaaatctaaagacatttcaccattatggtgatttcccacaacacatagcgacatgcaaatatctcagagcgtacctcccctgtcctatacgggcgtcaactcgccagggcgcacgcgcgctgtgtgtttcccgcctgtgactcgggactctgggcccgcgattcctcggagcgggttgataacgtcagctccggtgcttc

SEQ ID NO: 1169 - DNA, 243 bp, Artificial Sequence
  Description of Artificial Sequence: Synthetic polynucleotide
tgggaaaaggtgggcccacacagaatttataaggctcccatacctaaagacatttcacgattatggtgacttcccacaatacatagcgacatgcaaatatcgcggggcgtgcctcccctgtcccgtaccccacaggcgtcttctcgccagggcgcacgcgcgctgcgtgttcccgccctgtgactagggattctgggcccgcgattcctgggagcgggttgatgacgtcagcgttcgggctcc

SEQ ID NO: 1170 - DNA, 243 bp, Artificial Sequence
  Description of Artificial Sequence: Synthetic polynucleotide
tgaggaaaagtgggcccacacagaatttataaggttcccaaacctaaagacatttcaccattatggtgacttcccacaatacatagcgacatgcaaatatctcagggcgtgcctcccctgtcccgtaccccacgggcgtcaactcgccagggcgcacgcgcgctgcgtgtttcccgcctgtgactcgggactctgggcccgcgattcctgggagcgggttgatgacgtcagctctggggcttc

SEQ ID NO: 1171 - DNA, 236 bp, Artificial Sequence
  Description of Artificial Sequence: Synthetic polynucleotide
tggcagaaagcggcccgccgccgcatttataaggctctcccacctaaagccatataatggttatggtgacttcccagaatacatggcaacatgcaaatatcgtgcggtatacctcccctgtcgcgcgtaggcgtctcctcccctggacgcacgggcgccgcatgttcccgccctatgactctgggccggcgactacgggagagagctgatgacgtgaccgcgaccgctcgggctcc

SEQ ID NO: 1172 - DNA, 236 bp, Artificial Sequence
  Description of Artificial Sequence: Synthetic polynucleotide
tgggaaaaagcggccccccgccgcatttataaggctctcccacctaaagacatttaacggttatggtgacttcccacaatacatagcaacatgcaaatatcgcgcggtatacctcccctgtcgcgcgtaggcgtctcctcccctggacgcacgggcgctgcgtgttcccgccctgtgactctgggccggcgactacgggagagagctgatgacgtgaccgcgaccgctcgggctcc

SEQ ID NO: 1173 - DNA, 219 bp, Artificial Sequence
  Description of Artificial Sequence: Synthetic polynucleotide
tgggaagtaagagattcacgccggttatataagattcctgtaactaaagaaatttcaaggatagggtgacttcccacaatacaaagcgacatgcaaatatcgcggggcgtgcctgtcctgacctttgtgagactcttcgctaggacgcaggcgtgctgcgagttcccgccttatcggcgagtcctgggggagagttgatgacgccaacattcgggctcc

SEQ ID NO: 1174 - DNA, 231 bp, Artificial Sequence
  Description of Artificial Sequence: Synthetic polynucleotide
tgggaaaaaaaggcttcacgcagattatataaggttcctgtacctaaagacatttcaaggttagggtgacttcccacaatacatagcgacatgcaaatatagcggggcgtgcctcccctgtcccttgtgggcgtcttctcgctaggacgcacgcgcgctgcgtgttcccgccttgtgactctaggtcggcgagtcctgggagagggttgatgacgtcaacattcgggctcc

SEQ ID NO: 1175 - DNA, 228 bp, Artificial Sequence
  Description of Artificial Sequence: Synthetic polynucleotide
tgcgtaaaatacgcttctcgcagattatataaggttcctgtacctaaagacatttcaagggtagggtgacttcccacaacacatagcgacatgcaaatatagggtgtgtctcccctggcccttgtgggcgtcttctcgctaggacgcacgcgcgctgcgttttcccgccttctggctctaggtcggcgagtcccgggaaaggattgattacgtcaacattcgggcttc

SEQ ID NO: 1176 - DNA, 231 bp, Artificial Sequence
  Description of Artificial Sequence: Synthetic polynucleotide
tgcgtaaaaaaggcttcacgcagattatataaggttcctgtacctaaagacatttcaaggttagggtgacttcccacaatacatagcgacatgcaaatataggggggtgtgtctcccctggcccttgtgggcgtcttctcgctaggacgcacgcgcgctgcgttttcccgccttgtgactctaggtcggcgagtcctgggaaaggattgattacgtcaacattcgggcttc

SEQ ID NO: 1177 - DNA, 231 bp, Artificial Sequence
  Description of Artificial Sequence: Synthetic polynucleotide
tgcgtaaaaaaggcttcacggtgactatataaggttcctgtacctaatgacatttcaagattagggtgacttcccacaatacatagcgacatgcaaataaaggggggtttctcgtctgtcccccctgtgggcgtcttcttgctaggacgcacgcgcgctgcgttttcccgccttgtgattctgggtcggcaagtcctgggaaaggattgattacgtcaacattcgggcttc

SEQ ID NO: 1178 - DNA, 237 bp, Artificial Sequence
  Description of Artificial Sequence: Synthetic polynucleotide
tgagaaaaaaaggccacacggagaatatataaggctcccatatctgaagacattttaagattagggtgatttcccacaatacatagcgacatgtaaatgtagtggggcatgccttccctgtcccttgtgggcagcttctcgccaggacgcacgcgcgctgcgtgttcccgccttgtgactaaattggcgagtctgggaggagactgatgatgtcagcatcatcaactttcccgctcc

SEQ ID NO: 1179 - DNA, 237 bp, Artificial Sequence
  Description of Artificial Sequence: Synthetic polynucleotide
tgagggaagactgtcgtagggagaatatataaggctcccatatcgctagacattttaagatgagggtgatttcccacaatgcatagcgacatgtaaatgaagtggggcatgctttccctgtcccttgtgggcagcttctcgccaggacgcacgcgcgctgcgtgttcccgccttgtgactaaattggcgagtctgggaggagactgatgatgtcagcatcatcaactttcccgctcc

SEQ ID NO: 1180 - DNA, 241 bp, Artificial Sequence
  Description of Artificial Sequence: Synthetic polynucleotide
tgggaaaaaaaggcttcacgcagaatatataaggctcccatatctaaagacatttcaaggttagggtgacttcccacaatacatagcgacatgcaaatatagcggggcgtgcctcccctgtcccttgtgggcatcttctcgccaggacgcacgcgcgctgcgtgttcccgccttgtgactctaggctggcgagtccctgggagagggttgatgacgtcagcatcgtcaacattcgggctcc

SEQ ID NO: 1181 - DNA, 237 bp, Artificial Sequence
  Description of Artificial Sequence: Synthetic polynucleotide
tgagaaaaaaaggcctcacgcagaatatataaggctcccatatctgaagacattttaagattagggtgatttcccacaatacatagcgacatgtaaatgtagtggggcatgcctcccctgtcccttgtgggcagcttctcgccaggacgcacgcgcgctgcgtgttcccgccttgtgactaaattggcgagtctgggaggagattgatgatgtcagcatcatcaactttcccgctcc

SEQ ID NO: 1182 - DNA, 237 bp, Artificial Sequence
  Description of Artificial Sequence: Synthetic polynucleotide
cgcgagaaaaattcttcacgcagaatatataaggatcccatatctgaagacattttacgattacggtgatttcccacaacacatagcgacatgtaaatgtagtggggcatgcctcccctgtcccttgtgggcagcttctcgccagaacgcacgcgcggtgcgtgttcccgccttgtgactaagttggcgagtcagggaggagattgatgatgtcatcatcgtcagctcacccgctcc

SEQ ID NO: 1183 - DNA, 237 bp, Artificial Sequence
  Description of Artificial Sequence: Synthetic polynucleotide
cgagagaaaaagtcttcacgcagaatatataaggatcccatatctgaagacattttacgattacggtgatttcccacaacacatagcgacatgtaaatgtagtggggcatgcctcccctgtcccttgtgggcagcttctcgccagaacgcacgcgcggtgcgtgttcccgccttgtgactaagttggcgagtcagggaggagattgatgatgtcatcatcgtcagctcacccgctcc

SEQ ID NO: 1184 - DNA, 237 bp, Artificial Sequence
  Description of Artificial Sequence: Synthetic polynucleotide
tgagaaaaaaaggcctcacgcagaatatataaggctcccatatctgaagacattttaaggttagggtgatttcccacaatacatagcgacatgtaaatgtagtggggcatgcctcccctgtcccttgtgggcagcttctcgccaggacgcacgcgcgctgcgtgttcccgccttgtgactaaattggcgagtctgggaggagattgatgacgtcagcatcatcaactttcccgctcc

SEQ ID NO: 1185 - DNA, 237 bp, Artificial Sequence
  Description of Artificial Sequence: Synthetic polynucleotide
tgagaaaaaaaggcctcacgcagaatatataaggctcccatatctgaagacattttaaggttagggtgatttcccacaatacatagcgacatgcaaatatagtggggcgtgcctcccctgtcccttgtgggcagcttctcgccaggacgcacgcgcgctgcgtgttcccgccttgtgactaaattggcgagtctgggaggggattgatgacgtcagcatcatcaactttcccgctcc

SEQ ID NO: 1186 - DNA, 262 bp, Artificial Sequence
  Description of Artificial Sequence: Synthetic polynucleotide
tgggaaaaagagggcttcacgcagaatatataaggctcccatatctaaagacatttcacggttagggtgacttcccccacaatacatagcgacatgcaaatatcatggtccttcagcggggcgtgcctcccctgtcccttgtgggcatcttctcgccaggacacgcacgcggcgcgctgcgtgttcccgccttgtgacttctaggcgggcgagtccctgggagagggttggatgacgtcagcatcgccaacattcgggctcc

SEQ ID NO: 1187 - DNA, 254 bp, Artificial Sequence
  Description of Artificial Sequence: Synthetic polynucleotide
tgggaaaaaaaggcttcacgcagaatatataaggctcccatatctaaagacatttcaaggttagggtgacttcccccacaatacatagcgacatgcaaatatcatggtccttcagcggggcgtgcctcccctgtcccttgtgggcatcttctcgccaggacgcacgcgcgctgcgtgttcccgccttgtgactctaggctggcgagtccctgggagagggttgatgacgtcagcatcgtcaacattcgggctcc

SEQ ID NO: 1188 - DNA, 230 bp, Artificial Sequence
  Description of Artificial Sequence: Synthetic polynucleotide
cgggaaaaaaacggcttctggtggaaaatatatgaggcccatacctgaagacctttcacggttatggtgacttcccacaatacatagcgacatgcaaatatagtggggcgtgcctccactgtcctttgcgggcatcgtctcgccaggaagcgcgcgctgcgtgttcccgccttttgactctaggcgggcgaatcctgggagagggttgttgacgtcaacattcgggctcc

SEQ ID NO: 1189 - DNA, 228 bp, Artificial Sequence
  Description of Artificial Sequence: Synthetic polynucleotide
caagagaaaaccgagccctgctggaaaatatatgaggcccactcttcaagaccttttatggttatggtaacttcccataacacatagcgacatgcaaatatcgtggggtgtgcctccacggtcctttgcggacaccgtcttgcccgtaagcgcgctgggtattcccgccttctgactctaggcgggcgaatcctaggagagggttgttgacgtcgacattcgggcacc

SEQ ID NO: 1190 - DNA, 230 bp, Artificial Sequence
  Description of Artificial Sequence: Synthetic polynucleotide
caagagagaaacgtgccctgctggaaaatatatgaggcccattcctcaagaccttttatggttatggtgacttcccacaacacatagcgacatgcaaatatcgtggggtgtgcctccactgtcctttgcggacaccgtcttgcccgtaagcgcgcgctgtgtattcccgccttttgactctaggcgggcgaatcctgggagagggttgttgacgtcgacattcgggctcc

SEQ ID NO: 1191 - DNA, 230 bp, Artificial Sequence
  Description of Artificial Sequence: Synthetic polynucleotide
caagaaagaaacgtcctctggtggaaaatatatgaggcccattcctcaagaccttttacggttatggtgacttcccacaacacatagcgacatgcaaatatcgtggggtgtgcctccactgtcctttgcggacaccgtcttgcccgtaagcgcgcgctgtgtattcccgccttttgactctaggcgggcgaatcctgggagagggttgttgacgtcgacattcgggctcc

SEQ ID NO: 1192 - DNA, 230 bp, Artificial Sequence
  Description of Artificial Sequence: Synthetic polynucleotide
caagaaagaaacgtcctctggtggaaaatatatgaggcccattcctcaagaccttttacggttatggtgacttcccacaatacatagcgacatgcaaatatcgtggggtgtgcctccactgtcctttgcggacaccgtcttgcccgtaagcgcgcgctgtgtattcccgccttttgactctaggcgggcgaatcctgggagagggttgttgacgtcgacattcgggctcc

SEQ ID NO: 1193 - DNA, 230 bp, Artificial Sequence
  Description of Artificial Sequence: Synthetic polynucleotide
caagaaagaaacgtgctctggtggaaaatatatgaggcccattcctcaagaccttttacggttatggtgacttcccacaacacatagcgacatgcaaatatcgtggggtgtgcctccactgtcctttgcggacaccgtcttgcccgtaagcgcgcgctgtgtattcccgccttttgactctaggcgggcgaatcctgggagagggttgttgacgtcgacattcgggctcc

SEQ ID NO: 1194 - DNA, 230 bp, Artificial Sequence
  Description of Artificial Sequence: Synthetic polynucleotide
cgggaaaaaaacggcctctggtggaaaatatatgaggcccatacctgaagacctttcacggttatggtgacttcccacaatacatagcgacatgcaaatatcgtggggcgtgcctccactgtcctttgcgggcatcgtctcgcccggaagcgcgcgctgtgtgttcccgccttttgactctaggcgggcgaatcctgggagagggttgttgacgtcaacattcgggctcc

SEQ ID NO: 1195 - DNA, 241 bp, Artificial Sequence
  Description of Artificial Sequence: Synthetic polynucleotide
tgggaaaaagagggcttcacgcggaatatataaggctcccatacctaaagacctttcacggttagggtgacttccccacaatacatagcgacatgcaaatatagtggggcgtgcctcccctgtcccttgcgggcatcttctcgccaggacacgcgcgcgccgcgctgcgtgttcccgccttttgacttctaggcgggcgaatcctgggagagggttggatgacgtccaacattcgggctcc

SEQ ID NO: 1196 - DNA, 232 bp, Artificial Sequence
  Description of Artificial Sequence: Synthetic polynucleotide
cgggaaaaaaagggcttctggcggaaaatatatgaggcccatacctgaagacctttcacggttatggtgacttcccacaatacatagcgacatgcaaatatagtggggcgtgcctcccctgtcccttgcgggcatcttctcgccaggaagcgcgcgcgctgcgtgttcccgccttttgactctaggcgggcgaatcctgggagagggttgatgacgtcaacattcgggctcc

SEQ ID NO: 1197 - DNA, 230 bp, Artificial Sequence
  Description of Artificial Sequence: Synthetic polynucleotide
caagagagaaacttgtcgtgctggaaaatatatgaggcccattcctcaggaccttttatggttagggtgatttcccacaatacatagcgacatgcaaatatagtggggtgtgcttccactgtcctttgcggacaccgtctcgcccgtaagcgcgcgctgtgtattcccgccttttgactctaggcgggcgaatcctgggagagggttgttgacgtcgacattcgggctcc

SEQ ID NO: 1198 - DNA, 230 bp, Artificial Sequence
  Description of Artificial Sequence: Synthetic polynucleotide
caagagagaaacttgtcgtgctggaaaatatatgaggcccattcctcaggaccttttatggttagggtgacttcccacaacacatagcgacatgcaaatatcgtggggtgtgcttccactgtcctttgcggacaccgtctcgcccgtaagcgcgcgctgtgtattcccgccttttgactctaggcgggcgaatcctgggagagggttgttgacgtcgacattcgggctcc

SEQ ID NO: 1199 - DNA, 227 bp, Artificial Sequence
  Description of Artificial Sequence: Synthetic polynucleotide
cgaggaaataatctcccctggtggcaaatataggaagcccattcctcaagaccttttaaggttacggtgacttcccacaatacatagcaacatgcaaatattgtggggtgtgccttcactgtcctttgcggtcactgtcttgcccataagcgcgctgtgtaatcccgccttttgacgttaggcaggcgaatcctgggagagggttgctgacgtcgacattcggctcc

SEQ ID NO: 1200 - DNA, 227 bp, Artificial Sequence
  Description of Artificial Sequence: Synthetic polynucleotide
caaggaagtaacgtcctctggtggaaaatatatgaggcccattcctcaagaccttttacggttatggtgacttcccacaatacatagcaacatgcaaatatcgtggggtgtgcctccactgtcctttgcggacactgtcttgcccgtaagcgcgctgtgtaatcccgccttttgactctaggcgggcgaatcctgggagagggttgttgacgtcgacattcggctcc

SEQ ID NO: 1201 - DNA, 215 bp, Artificial Sequence
  Description of Artificial Sequence: Synthetic polynucleotide
ggggagaaggcgctttccgcggattatataaggctccagcacctagaggcctttaacagttagggtgatttcccacaatgcatagcgacatgcaaatatagttgggtgtgctttccctgttccttgcctgcatcttcttgcctgcgtgttcccgccttttgactgcaggcgggcgaatcctgggagagagttgatgacgtcaacactcaggctcc

SEQ ID NO: 1202 - DNA, 240 bp, Artificial Sequence
  Description of Artificial Sequence: Synthetic polynucleotide
ggggagaaaggggcttcacggcgaatatataaggctcccgtacctaaaggcctttcacggttagggtgacttccccacaatacatagcgacatgcaaatatagttgggcgtgcctcccctgtcccttgcgggcatcttctcgcccggacacgcgcgcgccgcgctgcgtgttcccgccttttgacttccaggcgggcgaatcctgggagagggttggatgacgtccaacattcgggctcc

SEQ ID NO: 1203 - DNA, 232 bp, Artificial Sequence
  Description of Artificial Sequence: Synthetic polynucleotide
aggaagggagcctcacacggcggctatataaggccccctgccctgtaggcctttcacagttagggcgacttccccacaacacatagcgacatgcaaatgtggatgggcgtgcctccccggtccctgccggcaacttctctccgggacgcgcgctcgcgctgagtgttcccgccttttgacgccagcggagcgaatccggggagcgggcggatgacgtcaacagtgcggctcc

SEQ ID NO: 1204 - DNA, 232 bp, Artificial Sequence
  Description of Artificial Sequence: Synthetic polynucleotide
aggaagggagcctcacacggcggctatataaggccccctgccctgtaggcctttcacagttagggcgacttccccacaacacatagcgacatgcaaatgtagatgggcgtgcctccccggtccctgccggcaacttctctccgggacgcgcgctcgcgctgagtgttcccgccttttgacgccagccgagcgaatccggggagcgggcggatgacgtcaacagtgcggctcc

SEQ ID NO: 1205 - DNA, 232 bp, Artificial Sequence
  Description of Artificial Sequence: Synthetic polynucleotide
aggaagggagcctcacacggcggctatataaggccccctgccctgtaggcctttcacagttagggcgacttccccacaacacatagcgacatgcaaatgtggatgggcgtgcctccccggtccctgccagcaacttctctccgggacgcgcgctcgcgctgagtgttcccgccttttgacgccagcggagcgaatccggggagcgggcggatgacgtgaacagtgcggctcc

SEQ ID NO: 1206 - DNA, 235 bp, Artificial Sequence
  Description of Artificial Sequence: Synthetic polynucleotide
gggaagagagcctcacacggcggctatataaggcccccttacctataggccttttacggttagggtgacttccccacaacacatagcgacatgcaaatttagatgggcgtgcctcccctgtccctgtgggcaacttctctccgggacacgcgcgctcgcgctgagtgttcccgccttttgacttccagccgagcgaatcctgggagagggcagatgacgtcaacagtcaggctcc

SEQ ID NO: 1207 - DNA, 231 bp, Artificial Sequence
  Description of Artificial Sequence: Synthetic polynucleotide
gggaagagggcctcacacgagggctatataaggcccccttacctataggccttttacggttagagtgacttcccacaacacctagcgacatgcaaatttagatgggcgtgcctcctctgtccctgtggcaacacctctccgggacgcgcgctcgctctgagtgttcccgccttttgacttccagccgaacgaatcctgggagagggcagatgacgtcaatagtcaggctcc

SEQ ID NO: 1208 - DNA, 230 bp, Artificial Sequence
  Description of Artificial Sequence: Synthetic polynucleotide
gggaagagggcctcacacgagggctatataaggcccccttacctataggccttttatggttagagtgacttcccacaacacctagcgacatgcaaatttagatgggcgtgcctcctctgtccctgtggcaacacctctccgggacgcgcgctcgctctgagcgttcccgccttttgacttccagccgaacgaatcctgggagagggcagtgacgtcaatagtcaggctcc

SEQ ID NO: 1209 - DNA, 234 bp, Artificial Sequence
  Description of Artificial Sequence: Synthetic polynucleotide
gggaagagagcctcacacggcggctatataaggcccccttacctataggccttttacggttagggtgacttcccacaacacatagcgacatgcaaatttagatgggcgtgcctcccctgtccctgtgggcaacttctctccgggacacgcgcgctcgcgctgagtgttcccgccttttgacttccagccgagcgaatcctgggagagggcagatgacgtcaacagtcaggctcc

SEQ ID NO: 1210 - DNA, 235 bp, Artificial Sequence
  Description of Artificial Sequence: Synthetic polynucleotide
gggaagagaggcctacacggcggctatataaggcccccttacctataggccttttacggttagggtgacttccccacaacacatagcgacatgcaaatttagatgggcgtgcctcccctgtccctgtgggcaacttctctccgggacacgcgcgctcgcgctgagtgttcccgccttttgacttccagccgagcgaatcctgggagagggcagatgacgtcaacagtcaggctcc

SEQ ID NO: 1211 - DNA, 238 bp, Artificial Sequence
  Description of Artificial Sequence: Synthetic polynucleotide
gggaagagaggcactacacggcggctatataaggcccccttacctataggccttttacggttagggtgacttccccacaacacatagcgacatgcaaatttagatgggcgtgcctcccctgtccctgtgggcaacttctctccgggacacgcgcgctccgcgctgagtgttcccgccttttgacttccagccgagcgaatcctgggagagggcagatgacgtccaacagtcaggctcc

SEQ ID NO: 1212 - DNA, 233 bp, Artificial Sequence
  Description of Artificial Sequence: Synthetic polynucleotide
gggagaagggggagtacacggcggatatataaggcccccttatgtatagtccttttacggttagggtgacttcccacaacgcatagcgacatgcaaatttgacgggcgtgcctcctctgtccctgcgggcaacttctctcctggacgcgcgctccgcgctgcgtgttcccgccttttgactccagccgagcgaatcctgggagagggcaggtgacgtccaacagtcaggctcg

SEQ ID NO: 1213 - DNA, 232 bp, Artificial Sequence
  Description of Artificial Sequence: Synthetic polynucleotide
gagagaggctgtgcacacggcggatatataaggcccccttatgtataatcctttaccggttagggtgacttcccacaacgcatagcgacatgcaaatttgacgggcgtgcctcctctgtccctgcgggcaacttctctcctggacgcgcgctccgcgctgcgtgttcccgccttttgactccagccgagcgaatcctgggagagggcaggtgacgtccaacagtcaggctcg

SEQ ID NO: 1214 - DNA, 231 bp, Artificial Sequence
  Description of Artificial Sequence: Synthetic polynucleotide
gggagaagggggagtacacggcggatatataaggcccccttatgtatagtccttttacggttagggtgacttcccacaacgcatagcgacatgcaaatttgacgggcgtgcctcctctgtccctgcgggcaacttctctcctggacgcgcgctcgcgctgcgtgttcccgccttttgactccagccgagcgaatcctgggagagggcaggtgacgtcaacagtcaggctcg

SEQ ID NO: 1215 - DNA, 240 bp, Artificial Sequence
  Description of Artificial Sequence: Synthetic polynucleotide
gggaagagaggcactacacggcggctatataaggcccccttacctataggccttttacggttagggtgacttccccacaacacatagcgacatgcaaatttagatgggcgtgcctcccctgtcccttgtgggcaacttctctccgggacacgcgcgctccgcgctgagtgttcccgccttttgacttccagccgagcgaatcctgggagagggcaggatgacgtccaacagtcaggctcc

SEQ ID NO: 1216 - DNA, 215 bp, Artificial Sequence
  Description of Artificial Sequence: Synthetic polynucleotide
tagaaaaaatcgtagtttatgctggatttataagattcccacatctaaagccatttcacagttacggtgaacttcccactacacacggcgatatgcaaatatagcggaagtgttcctgaggcgtggtaaagcgcgcgcgcgctgagagttcccgccctgtggtgctgggctggagatgcctgagaactggctgatgacggcaacgttcgggctcc

SEQ ID NO: 1217 - DNA, 214 bp, Artificial Sequence
  Description of Artificial Sequence: Synthetic polynucleotide
tagaaaaaatcgtgcctatgctggatttataagattcccacatctaaagccatttctcagttacggtgaacttcccactacacacggcgatatgcaaatatagcggaagtgttcctgaggcgtggtaaagcgcgcgcgcgctgagagttcccgccctgtggtgctgggctggagatgcctgagaactggctgatgacggcaacgttcgggctcc

SEQ ID NO: 1218 - DNA, 214 bp, Artificial Sequence
  Description of Artificial Sequence: Synthetic polynucleotide
tagaaaaaatcgtgcctacgctggatttataagattcccacatctaaagccatttctcagttacggtgaacttcccactacacacggcgatatgcaaatatagcggaagtgttcctgaggcgtggtaaagcgcgcgcgcgctgagagttcccgccctgtggtgctgggctggagatgcctgagaactggctgatgacggcaacgttcgggctcc

SEQ ID NO: 1219 - DNA, 215 bp, Artificial Sequence
  Description of Artificial Sequence: Synthetic polynucleotide
tagaaaaaatggtagtttatgcgggatttataagactcccacatctaaagccatttcacagttacggtgacttccccacaacacacggcgatatgcaaatatagcggaagtgttcctgaggcgtggtaaagcgcacgcgcgctgagagttcccgccctgtggtgctgggcccgagatgcctgagagcgggctgatgacggcagcgtttgggctcc

SEQ ID NO: 1220 - DNA, 215 bp, Artificial Sequence
  Description of Artificial Sequence: Synthetic polynucleotide
tagaaaaaaggggagtttatgcgggatttataagactcccatatctaaagacatttcacagttatggtgacttccccacaacacatggcgatatgcaaatatcgcggagctggccctgaggcgtggtaaggcgcacgcgcgctgagagttcccgccctgtggcgctgggcccgagattcctgagagcgggttgatgacggcagcgtttgggctcc

SEQ ID NO: 1221 - DNA, 213 bp, Artificial Sequence
  Description of Artificial Sequence: Synthetic polynucleotide
tagagaaaagggggtgtttgcgggatttataagattcccattgctaaagacatttcacagttatggtgacttcccacaacacttggcgatatgcaaatatcacggagttggccctgaggcgcggcgagacgcacgcgcgctgagagttcccgccttctcaccctgggtccaaggttcctgaaggcgggttgaagactgcagtgtttgggcgcc

SEQ ID NO: 1222 - DNA, 215 bp, Artificial Sequence
  Description of Artificial Sequence: Synthetic polynucleotide
taggaaaaaggggggtttatgcaggatttataagactcccatatctaaagacatttcacggttatggtgacttccccacaacacatagcgatatgcaaatatcgcggagcgggccctgaggcgtggtcaggcgcacgcgcgctgcgagttcccgccctgtggcgctgggcccgagattcctgagagcgggttgatgacgtcagcgtttgggctcc

SEQ ID NO: 1223 - DNA, 212 bp, Artificial Sequence
  Description of Artificial Sequence: Synthetic polynucleotide
taggaaacgcgcattttaggcaggatttataagacacccatatctaaagacatttcacggttatggtgacttcccacaacacatagcgaaatgcaaatatgtggagcaggcgctgaggcgtggtcgggcgcacgcgcgctgcgagttcccgcccttcggcgctaggcccgagatgcctgagagctggttgatcacgtctgcgtttggactca

SEQ ID NO: 1224 - DNA, 212 bp, Artificial Sequence
  Description of Artificial Sequence: Synthetic polynucleotide
taggaaaagagcattttaggcaggatttataagacacccatatctaaagacatttcacggttatggtgacttcccacaacacatagcgaaatgcaaatatgtggagcgggcgctgaggcgtggtcgggcgcacgcgcgctgcgagttcccgcccttcggcgctaggcccgagattcctgagagctggttgatgacgtcagcgtttggactcc

SEQ ID NO: 1225 - DNA, 269 bp, Artificial Sequence
  Description of Artificial Sequence: Synthetic polynucleotide
tgggaaaaagaggggcttcacgcagcatttataaggctcccatatctaaagacatttcacggttagggtgacttcccccacaatacatagcgacatgcaaatatcatggtccttcagcggggcgtgcctccccctgtcccttggcccgtgggcatcttctcgccaggacacgcacgcggcgcgctgcgtgttcccgccttgtgacttctaggcgggcgagtccctgggagagggttggatgacgtcagcatcgccaacattcgggctcc

SEQ ID NO: 1226 - DNA, 233 bp, Artificial Sequence
  Description of Artificial Sequence: Synthetic polynucleotide
cgggaaaaagacgggcctcacgccgcatttataaggctcccatatctaacgacattttacggttagggtgacttcccacaatacatagcgatatgcaaatatagcggggcgtgtctccccctggcccttggctcgtgggcatcgtctcgccaggacgcatgcgcgctgcttgttcccgccttgactacttgctagtcctgggagagggttgatgacgtcaacgttcagactcc

SEQ ID NO: 1227 - DNA, 233 bp, Artificial Sequence
  Description of Artificial Sequence: Synthetic polynucleotide
ccggcataagacgggcctcacggcgcacttataaggatcccatatctaacgacattttacggttagggtgacttcccacaatacatagcgatatgcaaatatagcggggcgtgtctactcctggcccttggtttgtgggcgtcgtctcgccaggacgcatgcgcactgcttgttcccgccttgactacttgctagtcctgggagagggttgatgacgtcaacgttcagactcc

SEQ ID NO: 1228 - DNA, 233 bp, Artificial Sequence
  Description of Artificial Sequence: Synthetic polynucleotide
tcagcgtaaaggagtgcgtacaaagaatttataaggctcgcatagctctagctgcttcacagttagggtgacttcccacaagccatagcgcatgtaaatataagggcgtttgttcccccgcccccgtccaggctgcagcatctctccaggacgcaggcgcactgagccttcccgcccggtcactccagacccgccattcccgggccaggttaatgacgtcacacttaagctcc

SEQ ID NO: 1229 - DNA, 247 bp, Artificial Sequence
  Description of Artificial Sequence: Synthetic polynucleotide
tcagcgtaaagggatgcttacgtagaatttataaggctcccatacctaaagccatttcacggttagggtgacttcccacaagacatagcgacatgcaaatatagaggggcgtgcttcccctgtcccgtcccgtaggcgtcttctcgccagggacgcacgcgcgctgcgccctgttcccgccctgtcactagggattctgggccggccattccccgggcgcaggttgatgacgtcacgtttgggctcc

SEQ ID NO: 1230 - DNA, 239 bp, Artificial Sequence
  Description of Artificial Sequence: Synthetic polynucleotide
tcagcgtaaaagaatgcttagctagaatttataaggctcccagacctaaagccatatctcggttagggtgacttcccacaagacatagcgacatgcaaatatagaggggcgggcttcccctgtgccttgtaggcgtcttctcacgaagtcgcaagcgcgttgcgccctgttcccgccctgtcactattgattattggccgacctttcctcgggcggagtctgatgacgtcatcggttcc

SEQ ID NO: 1231 - DNA, 241 bp, Artificial Sequence
  Description of Artificial Sequence: Synthetic polynucleotide
tcagcgtaaaggaatgcttacctagaatttataaggctcccagacctaaagccatatcacggttagggtgacttcccacaagacatagcgacatgcaaatatagaggggcgggcttcccctgtgccttgtaggcgtcttctcacgaaggacgcacgcgcgctgcgccctgttcccgccctgtcactattgattattggccgaccattccccgggcgcagtctgatgacgtcattcggttcc

SEQ ID NO: 1232 - DNA, 212 bp, Artificial Sequence
  Description of Artificial Sequence: Synthetic polynucleotide
tgggggaagctgggctcgatcagcctttataaagctccaaaaactcaagacatttttccgttacggtggcttcccacagtacacagcgacatgcaaatagcttgccaatgaattcgcggaccgcttcccgccccggcgcaggcgcgcggacgctgtctcccctggacgcgcgctcgcggttcccgggagctggctgatgacgttcggtctcc

SEQ ID NO: 1233 - DNA, 225 bp, Artificial Sequence
  Description of Artificial Sequence: Synthetic polynucleotide
tggggaaaggtgggctcaagcagactttataaagctccaaaaactcaagacatttttccgttacggtggcttcccacaatacacagcgacatgcaaatatagtggagtgtgcttgccaatgatttcccgggccgcttctcgccacggcgcaggcgcgctgtgtgttcccgccctggacgggcgcgcccgcggttcccgggagcgggttgatgacgttcggtctcc

SEQ ID NO: 1234 - DNA, 213 bp, Artificial Sequence
  Description of Artificial Sequence: Synthetic polynucleotide
tggggagtggtggatccaagcagactttataaagctccgaaggtccaaggcatctttcccttacggtggcttcccacaagacatagcgatatgcaaatttatcgatacgtgcttcagacgcgcttctcgccgcagcgcaagcgcgctgtgtgctgacgcgggggacgggccagtgcgcgattcccgggagcgggttgatgacgttcgatctcc

SEQ ID NO: 1235 - DNA, 212 bp, Artificial Sequence
  Description of Artificial Sequence: Synthetic polynucleotide
tggggagaggtggatccgaacagactttataaagctccgaaagcccaaggcatctttcccttacggtagcttcccacaagacatagcgacatgcaaatttcttgaagtatgcttcagacgcgcttctcgccacagcgcaagcgcgctgtgtgctgacgcgggaacgggccagtgcgcggttcccgggagcgggttgatgacgttagatctcc

SEQ ID NO: 1236 - DNA, 213 bp, Artificial Sequence
  Description of Artificial Sequence: Synthetic polynucleotide
tggggagaggtggatccaaacagactttataaagctccgaaagcccaaggcatctttcccttacggtggcttcccacaagacatagcgacatgcaaatttattgaagtatgcttcagacgcgcttctcgccgcagcgcaagcgcgctgtgtgctgacgcgggagacgggccagtgcgcggttcccgggagcgggttgatgacgttcgatctcc

SEQ ID NO: 1237 - DNA, 176 bp, Artificial Sequence
  Description of Artificial Sequence: Synthetic polynucleotide
ttcagggtgtagaccggccgccactataaggctcgaaagaggaataaatttttcgtttagggtgatttcccacaaagcacagcgcgtaatttgcatgtgctctaccccaggctcctgtgctagacaagaagcccgcgcatccgggcaagggatgatgacgtcgtccttcaagagcg

SEQ ID NO: 1238 - DNA, 176 bp, Artificial Sequence
  Description of Artificial Sequence: Synthetic polynucleotide
ttcagggtgtagaccggccgccactataaggctcgaaagaggaataaatttttcgtttagggtgatttcccacaaagcacagcgcgtaatttgcatgtgctctatcccaggctcctgtgccagacaagaagcccgcgcatccgggcaagggatgatgacgtcgtccttcaagagcg

SEQ ID NO: 1239 - DNA, 176 bp, Artificial Sequence
  Description of Artificial Sequence: Synthetic polynucleotide
ttcagtgtgtagaccggccgccactataaggttcgaaagaggaataaatttttcgtttagggtgatttcccacaaagcacagcgcgtaatttgcatgtgctctaccccaggctcctgtgctagacaagaagcccgcgcatccgggcaagggatgatgacgtcgtccttcaagagcg

SEQ ID NO: 1240 - DNA, 183 bp, Artificial Sequence
  Description of Artificial Sequence: Synthetic polynucleotide
tggagggtgtagaccggccgccactataaggctcgaaagaggaataaatttttcgcttacggtgacttcccacaaagcacagcgcgtaatttgcatgtgctctatcccaggcttcctgttccagacaagaagcccgcgcatccgggcaagggatgatgacgtcatccccgtccttcaagcgcg

SEQ ID NO: 1241 - DNA, 176 bp, Artificial Sequence
  Description of Artificial Sequence: Synthetic polynucleotide
tggaaggtggagacctgccgccataataagactccaaaagagagtgaatttaacacttacggtgacttcccacaaagcacagcgtgtaatttgcatgcgctctagcccaggctccagctccggacgagaagcccgcgcatcccggcaaaggatgatgacgtcgtccttcaagcgct

SEQ ID NO: 1242 - DNA, 183 bp, Artificial Sequence
  Description of Artificial Sequence: Synthetic polynucleotide
tggagggtggagaccggccaccattataagactccaaagcggaataaattttacgcttatggtgacttcccacaaagcacagcgcgtaatttgcatgtgctctatcccaggcttcctgctccagacaagaagcccgcgcatccgggcaagggatgatgacgtcatccccgtccttcaagcgcg

SEQ ID NO: 1243 - DNA, 183 bp, Artificial Sequence
  Description of Artificial Sequence: Synthetic polynucleotide
tggagggtggagaccggccaccattataagactccaaagcggaataaattttacgcttatggtgacttcccacaaagcacagcgcgtaatttgcatgtgctctatcccaggcttcctgctccagacaagaagcccgcgcatccgggcaagggatgatgacgtcatccccgtccctcaagcgcg

SEQ ID NO: 1244 - DNA, 183 bp, Artificial Sequence
  Description of Artificial Sequence: Synthetic polynucleotide
tggagggtggagaccggccaccattataagactcgaaagcggaataaattttacgcttatggtgacttcccacaaagcacagcgcgtaatttgcatgtgctctatcccaggcttcctgctccagacaagaagcccgcgcatccgggcaagggatgatgacgtcatccccgtccttcaagcgcg

SEQ ID NO: 1245 - DNA, 176 bp, Artificial Sequence
  Description of Artificial Sequence: Synthetic polynucleotide
tacagggtggagatcggcgaaaattataagactcgaaagcggcataaagtttaagcttatggtgacttcccacaaagcacagcgcgtaatttgcatgtgctttatcccaggctctttctccagaccagtagcctgcacatccgggcaaggggtgatgacgtcgtccatcaagcgcg

SEQ ID NO: 1246 - DNA, 183 bp, Artificial Sequence
  Description of Artificial Sequence: Synthetic polynucleotide
gggaaggtggagaccggccaccattataagactccaaagcggaatacatttttcggttatggtgacttcccacaaagcacagcgcgtaatttgcatgcgctctatcccaggcttcctgctccagacaagaagcccgcgcatccgggcaagggatgatgacgtcatccccgtccctcaagcgcg

SEQ ID NO: 1247 - DNA, 180 bp, Artificial Sequence
  Description of Artificial Sequence: Synthetic polynucleotide
acggcggtgtggagggcgaactttataagcctccgaagagaaagcgatttttcagttatggtggtttcccacaaggcacagcgcacagtttatttgcatgcgctctagccccggctcccgctccagactaagaagcccgcgcatttcggctgcggatgatgacgtcgggcctcaagcgcc

SEQ ID NO: 1248 - DNA, 190 bp, Artificial Sequence
  Description of Artificial Sequence: Synthetic polynucleotide
acggcggtgtggagggcgaactttataagcctccgaagagaaagcgatttttcagttatggtggtttcccacaaggcacagcgcacagtttatttgcatgcgctcccgccgcttctagccccggctcccgctccagactaagaagcccgcgcatttcggctgcggatgatgacgtcgggcctcaagcgcc

SEQ ID NO: 1249 - DNA, 203 bp, Artificial Sequence
  Description of Artificial Sequence: Synthetic polynucleotide
ggggaggtgtgggccggccagctttataagactccaaagcggaatgcatttttcagttatggtggcttcccacaaggcacagcgcgctgcttatttgcatgggctcacgccgcttctagcccgggcttcctgctccagactaagaagcccgcgcatcccggccgggcgagggatgatgacgtcatccccagccctcaagcgcg

SEQ ID NO: 1250 - DNA, 188 bp, Artificial Sequence
  Description of Artificial Sequence: Synthetic polynucleotide
ggagggcggtggccggcgagcttaataagcctcggaggcgggacgcctgttacagtgacggtggtttcccacaaagcacggcgcggcggtcttgatttgcatgcgcctttatgcccgcctcccgctccggagaagaagcccgcgcatcccggctgggctgggggtgatgacgtcagggctcgagcgcc

SEQ ID NO: 1251 - DNA, 188 bp, Artificial Sequence
  Description of Artificial Sequence: Synthetic polynucleotide
ggagagcggtggccggcgagcttaataagcctcggaagcggaacgcattttacagtgatggtggtttcccacaaggcacagcgcggcggcctttatttgcatgcgcttctattcccgcctcccgctccagagaagaagcccgcgcatcccggctcggctggggatgatgacgtcagggctcgagcgcc

SEQ ID NO: 1252 - DNA, 185 bp, Artificial Sequence
  Description of Artificial Sequence: Synthetic polynucleotide
ggggtggtgtggctggcgagcttaataaggctccgaagcggaatgcattttacagtgatggtggtttcccacaaggcacagcgcggcgtttatttgcatgcgcttctattcccgcctcccgctccagacaagaagcccgcgcatcccggctcggctggggatgatgacgtcagggctcgagcgcc

SEQ ID NO: 1253 - DNA, 185 bp, Artificial Sequence
  Description of Artificial Sequence: Synthetic polynucleotide
ggagaggggtggccggcgagcttaataagcctccgaagcggaacgcattttacagtgatggtggtttcccacaaggcacagcgcggcgtttatttgcatgcgcttctattcccgcctcccgctccagagaagaagcccgcgcatcccggctcggctggggatgatgacgtcagggctcgagcgcc

SEQ ID NO: 1254 - DNA, 195 bp, Artificial Sequence
  Description of Artificial Sequence: Synthetic polynucleotide
ggggtggtgtgggtggcgagctttataaggctccgaagcggaatgcatttttcagttatggtggtttcccacaaggcacagcgcgccgtttatttgcatgggctcccgccgcttctagccccggctcccgctccagactaagaagcccgcgcatcccggcccggctggggatgatgacgtcaggcctcaagcgcc

SEQ ID NO: 1255 - DNA, 195 bp, Artificial Sequence
  Description of Artificial Sequence: Synthetic polynucleotide
ggggaggtgtgggcggcgagctttataagactccaaagcggaatgcatttttcagttatggtggtttcccacaaggcacagcgcgctgcttatttgcatgggctcacgccgcttctagcccgggctcccgctccagactaagaagcccgcgcatcccggccgggcaggggatgatgacgtcagccctcaagcgcg

SEQ ID NO: 1256 - DNA, 188 bp, Artificial Sequence
  Description of Artificial Sequence: Synthetic polynucleotide
gcaaagcggtggccggcgagcttaataagcctcggaggcgggacgcctgttacagtgacggtggtttcccacaaagcacggcgcggcggtcttgatttgcatgcgcctttatgcccgcctcccgctccggagaagaagcccgcgcatcccggctgggctgggggtgatgacgtcagggctcgagcgcc

SEQ ID NO: 1257 - DNA, 204 bp, Artificial Sequence
  Description of Artificial Sequence: Synthetic polynucleotide
ggggaggtgtgggccggccagctttataagactccaaagcggaatgcatttttcagttatggtggcttcccacaaggcacagcgcgctgcttatttgcatgggctcacgccgcttctagcccgggcttcctgctccagactaaagaagcccgcgcatcccggccgggcgagggatgatgacgtcatccccagccctcaagcgcg

SEQ ID NO: 1258 - DNA, 176 bp, Artificial Sequence
  Description of Artificial Sequence: Synthetic polynucleotide
ggcgaggggtgggcagccacctttataagactccagagccgaatgcatttctcagttgtggtggcttcccatgaggcacagcgcgctatttgcatgcgctctagcccgggctccggctctggaataaaaaatcccgcgcatccgggtgagggatgacgacgtcaccctcaagcgct

SEQ ID NO: 1259 - DNA, 203 bp, Artificial Sequence
  Description of Artificial Sequence: Synthetic polynucleotide
ggggaagtgggggcaggccggctttataagactccagagcggaacgcatttttcagttatggtggcttcccacaaggcacagcgctatgcttatttgcatgggctcacgccgcttctagcccgggccccctgctccagacaaaaaagcccgcgcatcccggccgggcgcgggatgatgacgtcatccccagccctcgagcgcg

SEQ ID NO: 1260 - DNA, 170 bp, Artificial Sequence
  Description of Artificial Sequence: Synthetic polynucleotide
gaagaagtgggggagaccggctttataagactcagaagggaacaaacttttcagttgcggtggcttcccacaaggcacagcgctttatttgcatgcgcgctaaccggggccccctactaaaaagcccgcgcatgcccggcgcgggatgatgacgtcagccctcgagcgcg

SEQ ID NO: 1261 - DNA, 170 bp, Artificial Sequence
  Description of Artificial Sequence: Synthetic polynucleotide
gaagtcgtgggggagagcggctttataagactcagaagggaacaaacttttcagttgcggtggcttcccacaaggcacagcgctttatttgcatgcgcgctaaccggggccccctactaaaaagcccgcgcatgtccggcgcgggatgatgacgtcagcccccgagcgcg

SEQ ID NO: 1262 - DNA, 221 bp, Artificial Sequence
  Description of Artificial Sequence: Synthetic polynucleotide
ggggaagtgggggcaggccggctttataagactccagagcggaacgcatttttcagttatggtggcttcccacaaggcacagcgctatgcttatttccatggccccacctcagcatggaagctcacgccgcttctagcccgggccccctgctccagacaaaaaagcccgcgcatcccggccgggcgcgggatgatgacgtcatccccagccctcgagcgcg

SEQ ID NO: 1263 - DNA, 201 bp, Artificial Sequence
  Description of Artificial Sequence: Synthetic polynucleotide
gggaaggcggggccggcggcgctaaaaggctccggggcggcccggacttatcagttacggtggcttcccacgaggcgcagcgccgctcatttgcatggccccaccccagacgggaagcccgcgccgctcatttgcgtggccccgccccagacgggaagcccgcgctgctcggccgcggtggtgacgtcggcctctcgcgcc

SEQ ID NO: 1264 - DNA, 201 bp, Artificial Sequence
  Description of Artificial Sequence: Synthetic polynucleotide
gggaaagcggggccggcggcgctaaaagactccagggcggcccggacttatcagttacggtggcttcccacgaggcgcagcgccgctcatttgcatggccccaccccagaagggaagcccgcgccgctcatttgcgtggccccgccccagacgggaagcccgcgctgcccggccgcggtggtgacgtcggcctctcgcgcc

SEQ ID NO: 1265 - DNA, 200 bp, Artificial Sequence
  Description of Artificial Sequence: Synthetic polynucleotide
gggaaggcggggccggcggcgctaaaaggctccggggccgcccggacttcacagttacggtggcttcccacgaggcgcagcgctgtcatttgcatggccccgccccagacgggaagcccgcgctgctcatttgcgtggccccgccccagacgggaagcccgcgctgctcggccgcggtggtgacgtcggcctctcgcgcc

SEQ ID NO: 1266 - DNA, 223 bp, Artificial Sequence
  Description of Artificial Sequence: Synthetic polynucleotide
tgaaaggggctcatcacaagcagagtttataaggctcccatgtgtacagccatttctcggtcatggtaactacccacaacacacagcgatatgcaaatatagcagagagtgtcttcccgcgcgcgcctggtcgtcttcgcgccggcgcgctgcgtggagcggaactatgacagagaccctgcgattcctgggagctggctgatgacgtcagtgtctaacctcc

SEQ ID NO: 1267 - DNA, 223 bp, Artificial Sequence
  Description of Artificial Sequence: Synthetic polynucleotide
tgaaaggaactcatcacaagcagagtttataaggctcccatgtgtacagccatttctcggtcatggtaactacccacaacacacagcgatatgcaaatatagcagagagtgtcttcccgcgcgcgcctggtcgtcttcgcgccggcgcgctgcgtggagcggaactatgacagagaccctgcgattcctgggagctggctgatgacgtcagtgtctaacctcc

SEQ ID NO: 1268 - DNA, 223 bp, Artificial Sequence
  Description of Artificial Sequence: Synthetic polynucleotide
tgaaaggaactcatcacaagcagagtttataaggctcccatgtgtacagccatttctcggtcatggtaactacccacaacacacagcgatatgcaaatatagcagagagtgtcttcccgcgcgcgcctggtcgtcttcgcgccggcgcgctgcgtggagcggaactgtgacagagaccctgcgattcctgggagctggctgatgacgtcagtgtctaacctcc

SEQ ID NO: 1269 - DNA, 223 bp, Artificial Sequence
  Description of Artificial Sequence: Synthetic polynucleotide
tgaaaggaactcatctcaagcagagtttataaggctcccatgtgtacagccatttctcggtcatggtaactacccacaacacacagcgatatgcaaatatagcagagagtgtcttcccgcgcgcgcctggtcgtcttcgcgccggcgcgctgcgtggagcggaactgtgacagagaccctgcgattcctgggagctggctgatgacgtcagtgtctaacctcc

SEQ ID NO: 1270 - DNA, 231 bp, Artificial Sequence
  Description of Artificial Sequence: Synthetic polynucleotide
tgagagaaaataagctcaagcagaacttataaggctcccaaatgtacagacatttctcggtcatggtaactacccacaacacacagcgatatgcaaatatagcagagtgtgcctccccgctcccgtccggtcgtcttctcgccggagcgcaggcgcgctgcgtggtgcgggactgtgaccctgagcctgcgattcctgggagcgggctgatgacgtcagcgtctgacctcc

SEQ ID NO: 1271 - DNA, 231 bp, Artificial Sequence
  Description of Artificial Sequence: Synthetic polynucleotide
tgagagaaactaatctcaagcagaacttataaggctcccatatgtacagacatttctcggtcatggtaactacccacaacacacagcgatatgcaaatatagcagagtgtgcctccccgctcgcgtccggtcgtcttctcgccggagcgcaggcgcgctgcgtggtgcgggactgtgaccctgagcctgcgattcctgggagcgggctgatgacgtcagcgtctaacctcc

SEQ ID NO: 1272 - DNA, 231 bp, Artificial Sequence
  Description of Artificial Sequence: Synthetic polynucleotide
tgagagaaagtaagctgaagcagaacttataaggctcccaaatctacagacatttctcggtcatggtgactacccacaacacacagcgatatgcaaatatcgcggggtgtgcctccctgctctcgtccggtcgtcttctcgccagggcgcaggcgcgctgcgtggtccgggcctgtgaccctgagcccgcgattcctgggagcgggttgatgacgtcagcgtttgacctcc

SEQ ID NO: 1273 - DNA, 247 bp, Artificial Sequence
  Description of Artificial Sequence: Synthetic polynucleotide
tgggagaaagtgggctgaagcagaacttataaggctcccaaatctaaagacatttttcggtcatggtgacttcccacaacacacagcgatatgcaaatatcgcggggtgtgcgcctccctgctctcgtccagtcgtcttctcgccagggcgcacgcgtactagcgcgctgcgttgttcccggcctgtgacagagcctgagcccgcgatttcctgggagcgggttgatgacgtcagcgtttgaactcc

SEQ ID NO: 1274 - DNA, 233 bp, Artificial Sequence
  Description of Artificial Sequence: Synthetic polynucleotide
tgggagaaagtgggctgaagcagaacttataaggctcccaaatctaaagacatttttcggtcatggtgacttcccacaacacacagcgatatgcaaatatcgcggggtgtgcgcctccctgctctcgtccagtcgtcttctcgccagggcgcacgcgcgctgcgtgttcccggcctgtgaccctgagcccgcgattcctgggagcgggttgatgacgtcagcgtttgaactcc

SEQ ID NO: 1275 - DNA, 223 bp, Artificial Sequence
  Description of Artificial Sequence: Synthetic polynucleotide
tgaaagggactcctctcaagcagagtttataaggctcccatgtgtacagccatttctcggtcatggtaactacccacaacacacagcgatatgcaaatatagcagagagtgtcttcccgcgcgcgcctggtcgtctcggcgccggcgcgctgcgtggggcggaactgtgacagagaccctgcgattcctgggagctggctgatgacgtcagtgtctaacctcc

SEQ ID NO: 1276 - DNA, 223 bp, Artificial Sequence
  Description of Artificial Sequence: Synthetic polynucleotide
tgaaagggactcctctcaagcagagtttataaggctcccatgtgtacagccatttctcggtcatggtaactacccacaacacacagcgatatgcaaatatagcagagagtgtcttcccgcgcgcgcctggtcgtctcggcgccggcgcgctgcgtggggcggaactgtgacagagaccctgcgattcctgggagctggctgatgacatcagtgtctaacctcc

SEQ ID NO: 1277 - DNA, 229 bp, Artificial Sequence
  Description of Artificial Sequence: Synthetic polynucleotide
tgagggaagataagctcaagcagaacttataaggctcccaaatgtacagacatttatcggtcatggtaactacccacaacacacagcgatatgcaaatatagcagagcgtgcctcctgcacgggccggtcgtcttctcgccggagcgcaggcgcgctgcgtggtgcgggactgtgaccctgagcctgcgattcctgggagcgggctgatgacgtcagcgtctgagctcc

SEQ ID NO: 1278 - DNA, 233 bp, Artificial Sequence
  Description of Artificial Sequence: Synthetic polynucleotide
tgggagaaagtgggctgaagcaggacttataaggctcccaaatctaaagacattttttggtcatggtgacttcccacaacacacagcgtcatgcaaatatcatggggtgtgcgcctccctgctcccgtccagtcgtcttctcgccagggcgcacgcgcgctgcgtgttcccggcctgtgaccctgagcccgcgattgctgggagcgagttgatgacgtcagcgtttgaactcc

SEQ ID NO: 1279 - DNA, 235 bp, Artificial Sequence
  Description of Artificial Sequence: Synthetic polynucleotide
tggggaaagctgggctcaagcagagcttataaggctctcgtacctaaagacatttcacggtcatggtgactacccacaacacacagcgacatgcaaatttcgtggagtgtgcctccctccgcttgtcccgcgtcttttctctcccgggcgcacgcgcgcacgcacgcgacgcgttcccgccacagcgcccccgcggttcctgggagcgggttgatgacgtcagcatttggacgcc

SEQ ID NO: 1280 - DNA, 214 bp, Artificial Sequence
  Description of Artificial Sequence: Synthetic polynucleotide
tgaaagaaactagccacaaacggaaactataagaggtccaaagctcagtgtactctatggttagggtgacttcccacaatacatagcgatatgcagatttcttccccaatctggcccgccgggccctccctagagcgcatgcgctgcaggtccacggcagagcactgggcgggcgatcccgggagcgggttgatgacgtcagcgtttgaactcc

SEQ ID NO: 1281 - DNA, 214 bp, Artificial Sequence
  Description of Artificial Sequence: Synthetic polynucleotide
tgaaagaaactagccacaaacggaaactataagaggtccaaagctcagtgtactctatggttagggtgacttcccacaatacatagcgatatgcagatttcttccccagtctggcccgctgggccctccctagagcgcatgcgctgcaggtccacggcagagcactgggcgggcgatcccgggagcgggttgatgacgtcagcgtttgaactcc

SEQ ID NO: 1282 - DNA, 216 bp, Artificial Sequence
  Description of Artificial Sequence: Synthetic polynucleotide
tgaaagaaactagttacaaacggaaactataagaggtccaaagctcagtgtactttatggtcagggtgacttcccacaatacatagcgatatgtagatttcttccccgatctgggcccgccgggtcctccctagagcgcatgcgctgcaggtccacggcagaggactgggcgggcgattcccgggagcgggttgatgacgtcagcgtttgaactcc

SEQ ID NO: 1283 - DNA, 245 bp, Artificial Sequence
  Description of Artificial Sequence: Synthetic polynucleotide
tgagagaaaatggtttgaagcagaacttataagaatcccaaatctcagtatattttttggtcatggtgacttcccacaatacacagcgatatgtagatatcgcggggagcacctcccagttctggtccagtcggctcctcgctagggcgcacgcgtactagcgcgctgcatggttcccggcctgtgacagtgcctgagcccgcgatttcctgggagcgagttgatgacgtcagcgtttgaactcc

SEQ ID NO: 1284 - DNA, 217 bp, Artificial Sequence
  Description of Artificial Sequence: Synthetic polynucleotide
tgaaagaaactggtttcaaacggaaactataagaggtccaaatctcagtatactttttggtcagggtgacttcccacaatacacagcgatatgtagatttcctccccgatctggtcccgtcggctcctcgctagggcgcatgcgctgcaggtccccggcctatgactgggccggcgatttcccgggagcgagttgatgacgtcagcgtttgaactcc

SEQ ID NO: 1285 - DNA, 226 bp, Artificial Sequence
  Description of Artificial Sequence: Synthetic polynucleotide
tgaaaaaaaaggtttcaaagctacacttataaggctcccaaatgtcagtatattttttggtcacggtgacttcccacaatgcatagcgatatgtagatattgcgaggagtacctcccagttctggtcctgtcagctctttgctaggacgcacgcgctgcaggttcccagcctgtgattgggccagcgattccgggagcgaattgatgacgtcagcgtttgaactcc

SEQ ID NO: 1286 - DNA, 226 bp, Artificial Sequence
  Description of Artificial Sequence: Synthetic polynucleotide
tgaaaaaaaaggtttcaaagctacacttataaggctcccaaatctcagtatattttttggtcacggtgacttcccacaatgcatagcgatatgtagatattgcgaggagtacctcccagttctggtcctgtcagctctttgctaggacgcacgcgctgcaggttcccagcctgtgattgggccagcgattccgggagcgaattgatgacgtcagcgtttgaactcc

SEQ ID NO: 1287 - DNA, 226 bp, Artificial Sequence
  Description of Artificial Sequence: Synthetic polynucleotide
tgaaagaaaaggtttcaaagctacacttataaggatcccaaatctcagtatattttttggtcacggtgacttcccacaatacacagcgatatgtagatatcgcgaggagtacctcccagttctggtcctgtcagctctttgctagggcgcacgcgctgcaggttcacagcctgtgattgggcccgcgattccgggagcgaattgatgacgtcagcgtttgaactcc

SEQ ID NO: 1288 - DNA, 226 bp, Artificial Sequence
  Description of Artificial Sequence: Synthetic polynucleotide
tgaaagaaaaggtttcaaagctacacttataaggatcccaaatctcagtatattttttggtcacggtgacttcccacaagacacagcgatatgtagatatcgcgaggagtacctcccagttctggtcctgtcagctctttgctagggcgcacgcgctgcaggttcacagcctgtgattgggcccgcgattccgggagcgaattgatgacgtcagcgtttgaactcc

SEQ ID NO: 1289 - DNA, 232 bp, Artificial Sequence
  Description of Artificial Sequence: Synthetic polynucleotide
tgaaagaaaaagttttgaagcagaacttataagaatcccaaatctcagtatattttttggtcatggtgacttcccacaatacacagcgatatgtagatatcgcgaggagcacctcccagttctggtcctgtcagctcctcgctagggcgcacgcgcgctgcatggttcacagcctgtgaccctgggcccgcgattcctgggagcgagttgatgacgtcagcgtttgaactcc

SEQ ID NO: 1290 - DNA, 232 bp, Artificial Sequence
  Description of Artificial Sequence: Synthetic polynucleotide
tgaaagcaaaagttttgaagcagaacttataagaagcccaaatctcagtatattttttggtcatggtgacttcccacaatacacagcgatatgtagatatcgcgaggagcacctcccagttctggtcctgtcagctcctcactagggcgcatgcgcgctgcatggttcacagcctgtgaccctgggcctgcgattcctgggagcgagttgatgacgtcagcgtttgaactcc

SEQ ID NO: 1291 - DNA, 227 bp, Artificial Sequence
  Description of Artificial Sequence: Synthetic polynucleotide
tgaaagcaaaagttttgaagcagaacttataagaagcccaaatctcagtatattttttggtcatggtgacttcccacaatacacagcgatatgtagatatcgcgaggagcacctcccagttctggtcctgtcagctcctcactagggcgcatgcgctgcaggttcacagcctgtgactgggcctgcgattcctgggagcgagttgatgacgtcagcgtttgaactcc

SEQ ID NO: 1292 - DNA, 244 bp, Artificial Sequence
  Description of Artificial Sequence: Synthetic polynucleotide
tgagagaaaatgttttgaagcagaacttataagaatcccaaatctcagtatattttttggtcatggtgacttcccacaatacacagcgatatgtagatatcgcggggagcacctcccagttctggtccagtcggctcctcgctagggcgcacgcgtactagcgcgctgcatggttcccggcctgtgacagtgcctgagcccgcgattcctgggagcgagttgatgacgtcagcgtttgaactcc

SEQ ID NO: 1293 - DNA, 243 bp, Artificial Sequence
  Description of Artificial Sequence: Synthetic polynucleotide
tgagagaaaatgttttgaagcagaacttataagaatcccaaatctcagtatattttttggtcatggtgacttcccacaatacacagcgatatgtagatatggtggggagcacctcccagttctggcccagtcggctcctcgctagggcgcacgcgtactagcgcgctgcgggttcccggcctgtgacagtgcctgagcccgcgattcctgggagcgagttgatgacgtcagcgtttgaactcc

SEQ ID NO: 1294 - DNA, 243 bp, Artificial Sequence
  Description of Artificial Sequence: Synthetic polynucleotide
taagagaaagttttttgaagcagaacttataaggatcccaaaactcagtatattttttggtcatggtgacttcccacaatacacagcgatatgtagatatggtggggagcacctcccagttctggcccagtcggctcctcgctagggcgcacgcgtactagcgcgctgcgggttcccggcctgtgacagtgcctgagcccgcgattcctgggagcgagttgatgacgtcagcgtttgaactcc

SEQ ID NO: 1295 - DNA, 244 bp, Artificial Sequence
  Description of Artificial Sequence: Synthetic polynucleotide
tgagagaaaatggtttgaagcagaacttataagaatcccaaatctcagtatattttttggtcatggtgacttcccacaatacacagcgatatgtagatatcgcggggagcacctcccagttctggtccagtcggctcctcgctagggcgcacgcgtactagcgcgctgcatggttcccggcctgtgacagtgcctgagcccgcgattcctgggagcgagttgatgacgtcagcgtttgaactcc

SEQ ID NO: 1296 - DNA, 232 bp, Artificial Sequence
  Description of Artificial Sequence: Synthetic polynucleotide
taagagaaagctttctgaaccagagcttataaagatcccaaaactcaggctatattttggtcatggtgacttcccacaatacacagcgatatgtagatatagtggggagcacctcccagttctggcccagtcgggtcctctctagggcgcacgcgcgctgcgggttcccggcctgtgacagtgcctgagcccgcgattcctgggagcgagttgacgtcaccgtttgaacttc

SEQ ID NO: 1297 - DNA, 233 bp, Artificial Sequence
  Description of Artificial Sequence: Synthetic polynucleotide
tgggagaaagtgggctgaagcagaacttataaggctcccaaatctaaagacatttttcggtcatggtgacttcccacaacacacagcgatatgcaaatatcatggggtgtgcgcctccctgctctcgtccagtcgtcttctcgccagggcgcacgcgcgctgcgtgttcccggcctgtgaccctgagcccgcgattgctgggagcgagttgatgacgtcagcgtttgaactcc

SEQ ID NO: 1298 - DNA, 250 bp, Artificial Sequence
  Description of Artificial Sequence: Synthetic polynucleotide
tgggaaaaagtggggctcaagcagaatttataaggctcccaaacctaaagacattttacggttatggtgacttcccacaacacacagcgacatgcaaatatcgcggggtgtgcggcctccctgctctcgtccaggcgtcttctcgccagggcgcacgcgcgcacgcgcgctgcgctgttcccgccctggtgacggagcctgagcccgcgatttcctgggagcgggttgatgacgtcagcgtttggactcc

SEQ ID NO: 1299 - DNA, 232 bp, Artificial Sequence
  Description of Artificial Sequence: Synthetic polynucleotide
caggaaagactgcgctgaggcagactttataaggctcccgcgcagaaagaaactttatagttatggtgatttcccacaagccactgcgtcatgcaaataaagcagggttgacggcttccaagtatgtaccttaaggtttttctctaggccgcgtacgctctgcgtattcagccacgtgaccctgagccagtggttgttgggagcacgttgtggacctctgcgtttggattcc

SEQ ID NO: 1300 - DNA, 236 bp, Artificial Sequence
  Description of Artificial Sequence: Synthetic polynucleotide
caggaaagagtggggctcaggcagactttataaggctcccaaacagaaagacactttacagttatggtgacttcccacaagacactgcgtcatgcaaatatcgcagggttggcggccttccttctatcttccttaaggtttctctctagggcgcgtacgcgctgcgtattcccgccccggtgaccctgagccagtggttgttgggagcacgttgatgacgtctgcgtttggattcc

SEQ ID NO: 1301 - DNA, 250 bp, Artificial Sequence
  Description of Artificial Sequence: Synthetic polynucleotide
tggggagtggccgcctagggggcgatatataaggctcacaaaacccgtgctatttcttacagagggtgaatatccccatgatcctcggcggcatgcaaataatagttgcgtcagagtagagcgcagcctgccggtctctcctagcgcgggaaatcctgttttcttcttcagtcccggtgacgaggacgcgcgcgcgcaccgtagccggacaacggtctggtaaggtaggcgggattcggttgagagcgcc

SEQ ID NO: 1302 - DNA, 250 bp, Artificial Sequence
  Description of Artificial Sequence: Synthetic polynucleotide
cgtggaatccccgcctagggggcgctatataaggctcaccaaacccgtgctatttcttacagagggtgaatatcccatgatccttggcggcatgcaaataacagcttgcgtcagagtagagcgcagcctaccagtctttcctagcgcgggaaatcccgttttcttctgaggtcgccggtgacgcgcgcgtgcgccgtagccagagaacggtccgggaaggtaggccggccgggattcggttgagagcgcc

SEQ ID NO: 1303 - DNA, 242 bp, Artificial Sequence
  Description of Artificial Sequence: Synthetic polynucleotide
tgggacaaaaaactcttggtcacattatataagaatcccatatctaaagacatttcagggttagggtgacttccccaacaatacatagcgacatgcaaatatcatggtccttccaggaggcgtgcctccccgtccccttggtccaggtcttgctggggcgcacgcgcgctgcgtgttcccgctctgtgactctcagctcgcgattcctgagagcggattggtgaagtcaatgttctggctcc

SEQ ID NO: 1304 - DNA, 231 bp, Galeopterus variegatus; identical to SEQ ID NO: 679

SEQ ID NO: 1305 - DNA, 231 bp, Galeopterus variegatus; identical to SEQ ID NO: 680

SEQ ID NO: 1306 - DNA, 242 bp, Ovis orientalis; identical to SEQ ID NO: 269

SEQ ID NO: 1307 - DNA, 242 bp, Ovis aries; identical to SEQ ID NO: 271

SEQ ID NO: 1308 - DNA, 242 bp, Ovis aries; identical to SEQ ID NO: 272

SEQ ID NO: 1309 - DNA, 241 bp, Ovis ammon; identical to SEQ ID NO: 273

SEQ ID NO: 1310 - DNA, 241 bp, Ovis aries; identical to SEQ ID NO: 275

SEQ ID NO: 1311 - DNA, 241 bp, Ovis aries; identical to SEQ ID NO: 276

SEQ ID NO: 1312 - DNA, 241 bp, Ovis nivicola; identical to SEQ ID NO: 277

SEQ ID NO: 1313 - DNA, 241 bp, Hemitragus hylocrius; identical to SEQ ID NO: 278

SEQ ID NO: 1314 - DNA, 241 bp, Ovis canadensis; identical to SEQ ID NO: 279

SEQ ID NO: 1315 - DNA, 242 bp, Capra aegagrus; identical to SEQ ID NO: 280

SEQ ID NO: 1316 - DNA, 242 bp, Capra hircus; identical to SEQ ID NO: 282

SEQ ID NO: 1317 - DNA, 242 bp, Capra aegagrus; identical to SEQ ID NO: 283

SEQ ID NO: 1318 - DNA, 242 bp, Pseudois nayaur; identical to SEQ ID NO: 284

SEQ ID NO: 1319 - DNA, 242 bp, Capra sibirica; identical to SEQ ID NO: 285

SEQ ID NO: 1320 - DNA, 242 bp, Capra hircus; identical to SEQ ID NO: 286

SEQ ID NO: 1321 - DNA, 242 bp, Capra hircus; identical to SEQ ID NO: 288

SEQ ID NO: 1322 - DNA, 242 bp, Ammotragus lervia; identical to SEQ ID NO: 289

SEQ ID NO: 1323 - DNA, 242 bp, Kobus ellipsiprymnus; identical to SEQ ID NO: 290

SEQ ID NO: 1324 - DNA, 242 bp, Redunca redunca; identical to SEQ ID NO: 291

SEQ ID NO: 1325 - DNA, 242 bp, Antidorcas marsupialis; identical to SEQ ID NO: 292

SEQ ID NO: 1326 - DNA, 242 bp, Litocranius walleri; identical to SEQ ID NO: 293

SEQ ID NO: 1327 - DNA, 241 bp, Madoqua kirkii; identical to SEQ ID NO: 294

SEQ ID NO: 1328 - DNA, 242 bp, Raphicerus campestris; identical to SEQ ID NO: 295

SEQ ID NO: 1329 - DNA, 242 bp, Oryx dammah; identical to SEQ ID NO: 296

SEQ ID NO: 1330 - DNA, 240 bp, Hippotragus niger; identical to SEQ ID NO: 299

SEQ ID NO: 1331 - DNA, 242 bp, Nanger granti; identical to SEQ ID NO: 300

SEQ ID NO: 1332 - DNA, 242 bp, Eudorcas thomsonii; identical to SEQ ID NO: 301

SEQ ID NO: 1333 - DNA, 241 bp, Kobus leche; identical to SEQ ID NO: 302

SEQ ID NO: 1334 - DNA, 241 bp, Oreamnos americanus; identical to SEQ ID NO: 303

SEQ ID NO: 1335 - DNA, 242 bp, Beatragus hunteri; identical to SEQ ID NO: 304

SEQ ID NO: 1336 - DNA, 242 bp, Damaliscus lunatus; identical to SEQ ID NO: 305

SEQ ID NO: 1337 - DNA, 242 bp, Damaliscus lunatus; identical to SEQ ID NO: 306

SEQ ID NO: 1338 - DNA, 242 bp, Connochaetes taurinus; identical to SEQ ID NO: 307

SEQ ID NO: 1339 - DNA, 242 bp, Aepyceros melampus; identical to SEQ ID NO: 308

SEQ ID NO: 1340 - DNA, 242 bp, Pantholops hodgsonii; identical to SEQ ID NO: 309

SEQ ID NO: 1341 - DNA, 242 bp, Neotragus moschatus; identical to SEQ ID NO: 310

SEQ ID NO: 1342 - DNA, 237 bp, Ourebia ourebi; identical to SEQ ID NO: 311

SEQ ID NO: 1343 - DNA, 242 bp, Saiga tatarica; identical to SEQ ID NO: 312

SEQ ID NO: 1344 - DNA, 242 bp, Bubalus bubalis; identical to SEQ ID NO: 313

SEQ ID NO: 1345 - DNA, 242 bp, Syncerus caffer; identical to SEQ ID NO: 318

SEQ ID NO: 1346 - DNA, 242 bp, Syncerus caffer; identical to SEQ ID NO: 319

SEQ ID NO: 1347 - DNA, 243 bp, Bos sp.; identical to SEQ ID NO: 321

SEQ ID NO: 1348 - DNA, 243 bp, Bos indicus; identical to SEQ ID NO: 326

SEQ ID NO: 1349 - DNA, 243 bp, Bos taurus; identical to SEQ ID NO: 327

SEQ ID NO: 1350 - DNA, 244 bp, Bos taurus; identical to SEQ ID NO: 334

SEQ ID NO: 1351 - DNA, 242 bp, Bos mutus; identical to SEQ ID NO: 335

SEQ ID NO: 1352 - DNA, 242 bp, Bos sp.; identical to SEQ ID NO: 336

SEQ ID NO: 1353 - DNA, 242 bp, Bos mutus; identical to SEQ ID NO: 337

SEQ ID NO: 1354 - DNA, 242 bp, Bison bison; identical to SEQ ID NO: 338

SEQ ID NO: 1355 - DNA, 242 bp, Bos frontalis; identical to SEQ ID NO: 339

SEQ ID NO: 1356 - DNA, 242 bp, Bos gaurus; identical to SEQ ID NO: 340

SEQ ID NO: 1357 - DNA, 241 bp, Tragelaphus scriptus; identical to SEQ ID NO: 341

SEQ ID NO: 1358 - DNA, 241 bp, Tragelaphus buxtoni; identical to SEQ ID NO: 342

SEQ ID NO: 1359 - DNA, 241 bp, Tragelaphus oryx; identical to SEQ ID NO: 343

SEQ ID NO: 1360 - DNA, 238 bp, Tragelaphus strepsiceros; identical to SEQ ID NO: 344

SEQ ID NO: 1361 - DNA, 241 bp, Cephalophus harveyi; identical to SEQ ID NO: 345

SEQ ID NO: 1362 - DNA, 241 bp, Tragelaphus imberbis; identical to SEQ ID NO: 346

SEQ ID NO: 1363 - DNA, 238 bp, Tragelaphus eurycerus; identical to SEQ ID NO: 347

SEQ ID NO: 1364 - DNA, 238 bp, Tragelaphus spekii; identical to SEQ ID NO: 348

SEQ ID NO: 1365 - DNA, 242 bp, Giraffa tippelskirchi; identical to SEQ ID NO: 349

SEQ ID NO: 1366 - DNA, 241 bp, Okapia johnstoni; identical to SEQ ID NO: 352

SEQ ID NO: 1367 - DNA, 241 bp, Sylvicapra grimmia; identical to SEQ ID NO: 353

SEQ ID NO: 1368 - DNA, 242 bp, Cephalophus harveyi; identical to SEQ ID NO: 354

SEQ ID NO: 1369 - DNA, 242 bp, Philantomba maxwellii; identical to SEQ ID NO: 355

SEQ ID NO: 1370 - DNA, 242 bp, Neotragus pygmaeus; identical to SEQ ID NO: 356

SEQ ID NO: 1371 - DNA, 242 bp, Capreolus capreolus; identical to SEQ ID NO: 357

SEQ ID NO: 1372 - DNA, 242 bp, Capreolus pygargus; identical to SEQ ID NO: 358

SEQ ID NO: 1373 - DNA, 242 bp, Hydropotes inermis; identical to SEQ ID NO: 359

SEQ ID NO: 1374 - DNA, 242 bp, Muntiacus crinifrons; identical to SEQ ID NO: 360

SEQ ID NO: 1375 - DNA, 242 bp, Muntiacus muntjak; identical to SEQ ID NO: 361

SEQ ID NO: 1376 - DNA, 242 bp, Muntiacus reevesi; identical to SEQ ID NO: 362

SEQ ID NO: 1377 - DNA, 242 bp, Muntiacus muntjak; identical to SEQ ID NO: 363

SEQ ID NO: 1378 - DNA, 242 bp, Muntiacus muntjak; identical to SEQ ID NO: 365

SEQ ID NO: 1379 - DNA, 242 bp, Muntiacus reevesi; identical to SEQ ID NO: 366

SEQ ID NO: 1380 - DNA, 239 bp, Muntiacus crinifrons; identical to SEQ ID NO: 367

SEQ ID NO: 1381 - DNA, 242 bp, Cervus elaphus; identical to SEQ ID NO: 368

SEQ ID NO: 1382 - DNA, 242 bp, Cervus albirostris; identical to SEQ ID NO: 369

SEQ ID NO: 1383 - DNA, 242 bp, Cervus hanglu; identical to SEQ ID NO: 370

SEQ ID NO: 1384 - DNA, 242 bp, Elaphurus davidianus; identical to SEQ ID NO: 371

SEQ ID NO: 1385 - DNA, 242 bp, Axis porcinus; identical to SEQ ID NO: 372

SEQ ID NO: 1386 - DNA, 241 bp, Alces alces; identical to SEQ ID NO: 373

SEQ ID NO: 1387 - DNA, 242 bp, Odocoileus hemionus; identical to SEQ ID NO: 375

SEQ ID NO: 1388 - DNA, 242 bp, Odocoileus hemionus; identical to SEQ ID NO: 376

SEQ ID NO: 1389 - DNA, 242 bp, Odocoileus virginianus; identical to SEQ ID NO: 377

SEQ ID NO: 1390 - DNA, 242 bp, Odocoileus virginianus; identical to SEQ ID NO: 378

SEQ ID NO: 1391 - DNA, 242 bp, Rangifer tarandus; identical to SEQ ID NO: 379

SEQ ID NO: 1392 - DNA, 242 bp, Rangifer tarandus; identical to SEQ ID NO: 380

SEQ ID NO: 1393 - DNA, 238 bp, Procapra przewalskii; identical to SEQ ID NO: 381

SEQ ID NO: 1394 - DNA, 242 bp, Antilocapra americana; identical to SEQ ID NO: 382

SEQ ID NO: 1395 - DNA, 242 bp, Antilocapra americana; identical to SEQ ID NO: 383

SEQ ID NO: 1396 - DNA, 243 bp, Moschus moschiferus; identical to SEQ ID NO: 384

SEQ ID NO: 1397 - DNA, 243 bp, Moschus chrysogaster; identical to SEQ ID NO: 386

SEQ ID NO: 1398 - DNA, 251 bp, Bubalus bubalis; identical to SEQ ID NO: 389

SEQ ID NO: 1399 - DNA, 243 bp, Balaenoptera bonaerensis; identical to SEQ ID NO: 390

SEQ ID NO: 1400 - DNA, 243 bp, Eschrichtius robustus; identical to SEQ ID NO: 391

SEQ ID NO: 1401 - DNA, 243 bp, Eschrichtius robustus; identical to SEQ ID NO: 393

SEQ ID NO: 1402 - DNA, 243 bp, Megaptera novaeangliae; identical to SEQ ID NO: 394

SEQ ID NO: 1403 - DNA, 243 bp, Balaenoptera musculus; identical to SEQ ID NO: 395

SEQ ID NO: 1404 - DNA, 243 bp, Balaenoptera musculus; identical to SEQ ID NO: 396

SEQ ID NO: 1405 - DNA, 240 bp, Balaenoptera physalus; identical to SEQ ID NO: 397

SEQ ID NO: 1406 - DNA, 241 bp, Eubalaena japonica; identical to SEQ ID NO: 398

SEQ ID NO: 1407 - DNA, 245 bp, Balaenoptera acutorostrata; identical to SEQ ID NO: 399

SEQ ID NO: 1408 - DNA, 243 bp, Platanista minor; identical to SEQ ID NO: 400

SEQ ID NO: 1409 - DNA, 243 bp, Phocoena phocoena; identical to SEQ ID NO: 401

SEQ ID NO: 1410 - DNA, 243 bp, Neophocaena asiaeorientalis; identical to SEQ ID NO: 402

SEQ ID NO: 1411 - DNA, 243 bp, Phocoena sinus; identical to SEQ ID NO: 403

SEQ ID NO: 1412 - DNA, 243 bp, Monodon monoceros; identical to SEQ ID NO: 404

SEQ ID NO: 1413 - DNA, 243 bp, Monodon monoceros; identical to SEQ ID NO: 405

SEQ ID NO: 1414 - DNA, 243 bp, Delphinapterus leucas; identical to SEQ ID NO: 408

SEQ ID NO: 1415 - DNA, 243 bp, Tursiops truncatus; identical to SEQ ID NO: 411

SEQ ID NO: 1416 - DNA, 243 bp, Tursiops truncatus; identical to SEQ ID NO: 414

SEQ ID NO: 1417 - DNA, 243 bp, Tursiops truncatus; identical to SEQ ID NO: 419

SEQ ID NO: 1418 - DNA, 243 bp, Sousa chinensis; identical to SEQ ID NO: 420

SEQ ID NO: 1419 - DNA, 243 bp, Lagenorhynchus obliquidens; identical to SEQ ID NO: 422

SEQ ID NO: 1420 - DNA, 243 bp, Globicephala melas; identical to SEQ ID NO: 423

SEQ ID NO: 1421 - DNA, 243 bp, Orcinus orca; identical to SEQ ID NO: 424

SEQ ID NO: 1422 - DNA, 243 bp, Lipotes vexillifer; identical to SEQ ID NO: 425

SEQ ID NO: 1423 - DNA, 243 bp, Inia geoffrensis; identical to SEQ ID NO: 426

SEQ ID NO: 1424 - DNA, 242 bp, Pontoporia blainvillei; identical to SEQ ID NO: 427

SEQ ID NO: 1425 - DNA, 243 bp, Kogia breviceps; identical to SEQ ID NO: 429

SEQ ID NO: 1426 - DNA, 242 bp, Physeter catodon; identical to SEQ ID NO: 430

SEQ ID NO: 1427 - DNA, 242 bp, Mesoplodon bidens; identical to SEQ ID NO: 433

SEQ ID NO: 1428 - DNA, 242 bp, Ziphius cavirostris; identical to SEQ ID NO: 434

SEQ ID NO: 1429 - DNA, 242 bp, Hippopotamus amphibius; identical to SEQ ID NO: 435

SEQ ID NO: 1430 - DNA, 242 bp, Hippopotamus amphibius; identical to SEQ ID NO: 436

SEQ ID NO: 1431 - DNA, 258 bp, Vicugna pacos; identical to SEQ ID NO: 437

SEQ ID NO: 1432 - DNA, 258 bp, Lama guanicoe; identical to SEQ ID NO: 440

SEQ ID NO: 1433 - DNA, 258 bp, Lama glama; identical to SEQ ID NO: 441

SEQ ID NO: 1434 - DNA, 258 bp, Camelus dromedarius; identical to SEQ ID NO: 442

SEQ ID NO: 1435 - DNA, 258 bp, Camelus dromedarius; identical to SEQ ID NO: 444

SEQ ID NO: 1436 - DNA, 258 bp, Camelus ferus; identical to SEQ ID NO: 445

SEQ ID NO: 1437 - DNA, 258 bp, Camelus bactrianus; identical to SEQ ID NO: 446

SEQ ID NO: 1438 - DNA, 245 bp, Tragulus javanicus; identical to SEQ ID NO: 448

SEQ ID NO: 1439 - DNA, 245 bp, Tragulus kanchil; identical to SEQ ID NO: 449

SEQ ID NO: 1440 - DNA, 253 bp, Sus scrofa; identical to SEQ ID NO: 450

SEQ ID NO: 1441 - DNA, 253 bp, Sus scrofa; identical to SEQ ID NO: 454

SEQ ID NO: 1442 - DNA, 253 bp, Sus scrofa; identical to SEQ ID NO: 455

SEQ ID NO: 1443 - DNA, 253 bp, Sus scrofa; identical to SEQ ID NO: 462

SEQ ID NO: 1444 - DNA, 253 bp, Sus scrofa; identical to SEQ ID NO: 464

SEQ ID NO: 1445 - DNA, 253 bp, Sus scrofa; identical to SEQ ID NO: 465

SEQ ID NO: 1446 - DNA, 253 bp, Sus scrofa; identical to SEQ ID NO: 467

SEQ ID NO: 1447 - DNA, 253 bp, Catagonus wagneri; identical to SEQ ID NO: 468

SEQ ID NO: 1448 - DNA, 255 bp, Felis catus; identical to SEQ ID NO: 475

SEQ ID NO: 1449 - DNA, 254 bp, Felis nigripes; identical to SEQ ID NO: 476

SEQ ID NO: 1450 - DNA, 254 bp, Felis catus; identical to SEQ ID NO: 477

SEQ ID NO: 1451 - DNA, 254 bp, Puma concolor; identical to SEQ ID NO: 479

SEQ ID NO: 1452 - DNA, 254 bp, Acinonyx jubatus; identical to SEQ ID NO: 481

SEQ ID NO: 1453 - DNA, 254 bp, Lynx pardinus; identical to SEQ ID NO: 483

SEQ ID NO: 1454 - DNA, 254 bp, Lynx canadensis; identical to SEQ ID NO: 484

SEQ ID NO: 1455 - DNA, 254 bp, Puma yagouaroundi; identical to SEQ ID NO: 485

SEQ ID NO: 1456 - DNA, 252 bp, Panthera onca; identical to SEQ ID NO: 486

SEQ ID NO: 1457 - DNA, 252 bp, Panthera pardus; identical to SEQ ID NO: 487

SEQ ID NO: 1458 - DNA, 252 bp, Panthera leo; identical to SEQ ID NO: 488

SEQ ID NO: 1459 - DNA, 252 bp, Panthera leo; identical to SEQ ID NO: 489

SEQ ID NO: 1460 - DNA, 252 bp, Panthera tigris; identical to SEQ ID NO: 490

SEQ ID NO: 1461 - DNA, 254 bp, Paradoxurus hermaphroditus; identical to SEQ ID NO: 491

SEQ ID NO: 1462 - DNA, 254 bp, Hyaena hyaena; identical to SEQ ID NO: 492

SEQ ID NO: 1463 - DNA, 254 bp, Crocuta crocuta; identical to SEQ ID NO: 494

SEQ ID NO: 1464 - DNA, 254 bp, Mungos mungo; identical to SEQ ID NO: 495

SEQ ID NO: 1465 - DNA, 254 bp, Helogale parvula; identical to SEQ ID NO: 496

SEQ ID NO: 1466 - DNA, 254 bp, Suricata suricatta; identical to SEQ ID NO: 497

SEQ ID NO: 1467 - DNA, 254 bp, Cryptoprocta ferox; identical to SEQ ID NO: 499

SEQ ID NO: 1468 - DNA, 252 bp, Ailurus fulgens; identical to SEQ ID NO: 500

SEQ ID NO: 1469 - DNA, 253 bp, Ursus americanus; identical to SEQ ID NO: 501

SEQ ID NO: 1470 - DNA, 253 bp, Ursus thibetanus; identical to SEQ ID NO: 502

SEQ ID NO: 1471 - DNA, 253 bp, Ursus thibetanus; identical to SEQ ID NO: 503

SEQ ID NO: 1472 - DNA, 253 bp, Ursus maritimus; identical to SEQ ID NO: 504

SEQ ID NO: 1473 - DNA, 253 bp, Ursus arctos; identical to SEQ ID NO: 505

SEQ ID NO: 1474 - DNA, 253 bp, Ailuropoda melanoleuca; identical to SEQ ID NO: 506

SEQ ID NO: 1475 - DNA, 253 bp, Taxidea taxus; identical to SEQ ID NO: 508

SEQ ID NO: 1476 - DNA, 254 bp, Mirounga angustirostris; identical to SEQ ID NO: 509

SEQ ID NO: 1477 - DNA, 254 bp, Mirounga leonina; identical to SEQ ID NO: 510

SEQ ID NO: 1478 - DNA, 254 bp, Leptonychotes weddellii; identical to SEQ ID NO: 511

SEQ ID NO: 1479 - DNA, 254 bp, Neomonachus schauinslandi; identical to SEQ ID NO: 512

SEQ ID NO: 1480 - DNA, 254 bp, Phoca vitulina; identical to SEQ ID NO: 513

SEQ ID NO: 1481 - DNA, 254 bp, Halichoerus grypus; identical to SEQ ID NO: 514

SEQ ID NO: 1482 - DNA, 254 bp, Zalophus californianus; identical to SEQ ID NO: 515

SEQ ID NO: 1483 - DNA, 254 bp, Callorhinus ursinus; identical to SEQ ID NO: 521

SEQ ID NO: 1484 - DNA, 254 bp, Odobenus rosmarus; identical to SEQ ID NO: 522

SEQ ID NO: 1485 - DNA, 254 bp, Pteronura brasiliensis; identical to SEQ ID NO: 523

SEQ ID NO: 1486 - DNA, 254 bp, Neogale vison; identical to SEQ ID NO: 524

SEQ ID NO: 1487 - DNA, 254 bp, Lontra canadensis; identical to SEQ ID NO: 525

SEQ ID NO: 1488 - DNA, 254 bp, Lutra lutra; identical to SEQ ID NO: 526

SEQ ID NO: 1489 - DNA, 253 bp, Enhydra lutris; identical to SEQ ID NO: 528

SEQ ID NO: 1490 - DNA, 254 bp, Martes zibellina; identical to SEQ ID NO: 530

SEQ ID NO: 1491 - DNA, 254 bp, Gulo gulo; identical to SEQ ID NO: 531

SEQ ID NO: 1492 - DNA, 254 bp, Mustela erminea; identical to SEQ ID NO: 532

SEQ ID NO: 1493 - DNA, 255 bp, Mustela putorius; identical to SEQ ID NO: 534

SEQ ID NO: 1494 - DNA, 254 bp, Mustela putorius; identical to SEQ ID NO: 535

SEQ ID NO: 1495 - DNA, 255 bp, Mustela putorius; identical to SEQ ID NO: 549

SEQ ID NO: 1496 - DNA, 255 bp, Mustela putorius; identical to SEQ ID NO: 550

SEQ ID NO: 1497 - DNA, 252 bp, Mustela putorius; identical to SEQ ID NO: 551

SEQ ID NO: 1498 - DNA, 253 bp, Mustela putorius; identical to SEQ ID NO: 553

SEQ ID NO: 1499 - DNA, 254 bp, Mustela putorius; identical to SEQ ID NO: 555

SEQ ID NO: 1500 - DNA, 250 bp, Mustela putorius; identical to SEQ ID NO: 556

SEQ ID NO: 1501 - DNA, 254 bp, Mellivora capensis; identical to SEQ ID NO: 557

SEQ ID NO: 1502 - DNA, 254 bp, Potos flavus; identical to SEQ ID NO: 558

SEQ ID NO: 1503 - DNA, 253 bp, Procyon lotor
tgagcttccctccgccctacgagaaagggagggtccacagagcatttataaggctcccatatgtaaagccatttcacagttatggtgacttcccacaacgcatagcaacatgcaaatatcgtggggagtgcctcccctgtcccttgtacgcgtcttctcggacgcacgcacgcgcgctgtgttcccgccctgtgactccgggcgggcaattctcgggaggaggttgctgacgggaacgttcaggcttcatggc

SEQ ID NO: 1504 - DNA, 254 bp, Spilogale gracilis
tgagcttccctccgccctacgcaaaaaggtggtctcaaagagcatttataaggctcccatacctaatggcatttctcagttacggtgacttcccgcaatgcatagcaacatgcaaatatagcggggagtgcttcctcgatccctcctccgcgtcttctcaggacgcacgcacgcgcgctacgttcccgccctgtgactccaggcaggcaattcctgggagagggttgctgacgggaaagttcaggctccatggc

SEQ ID NO: 1505 - DNA, 243 bp, Balaenoptera bonaerensis; identical to SEQ ID NO: 390

SEQ ID NO: 1506 - DNA, 243 bp, Eschrichtius robustus; identical to SEQ ID NO: 391

SEQ ID NO: 1507 - DNA, 243 bp, Eschrichtius robustus; identical to SEQ ID NO: 393

SEQ ID NO: 1508 - DNA, 243 bp, Megaptera novaeangliae; identical to SEQ ID NO: 394

SEQ ID NO: 1509 - DNA, 243 bp, Balaenoptera musculus; identical to SEQ ID NO: 395

SEQ ID NO: 1510 - DNA, 243 bp, Balaenoptera musculus; identical to SEQ ID NO: 396

SEQ ID NO: 1511 - DNA, 240 bp, Balaenoptera physalus; identical to SEQ ID NO: 397

SEQ ID NO: 1512 - DNA, 241 bp, Eubalaena japonica; identical to SEQ ID NO: 398

SEQ ID NO: 1513 - DNA, 245 bp, Balaenoptera acutorostrata; identical to SEQ ID NO: 399

SEQ ID NO: 1514 - DNA, 243 bp, Platanista minor; identical to SEQ ID NO: 400

SEQ ID NO: 1515 - DNA, 243 bp, Phocoena phocoena; identical to SEQ ID NO: 401

SEQ ID NO: 1516 - DNA, 243 bp, Neophocaena asiaeorientalis; identical to SEQ ID NO: 402

SEQ ID NO: 1517 - DNA, 243 bp, Phocoena sinus; identical to SEQ ID NO: 403

SEQ ID NO: 1518 - DNA, 243 bp, Monodon monoceros; identical to SEQ ID NO: 404

SEQ ID NO: 1519 - DNA, 243 bp, Monodon monoceros; identical to SEQ ID NO: 405

SEQ ID NO: 1520 - DNA, 243 bp, Delphinapterus leucas; identical to SEQ ID NO: 408

SEQ ID NO: 1521 - DNA, 243 bp, Tursiops truncatus; identical to SEQ ID NO: 411

SEQ ID NO: 1522 - DNA, 243 bp, Tursiops truncatus; identical to SEQ ID NO: 414

SEQ ID NO: 1523 - DNA, 243 bp, Sousa chinensis; identical to SEQ ID NO: 420

SEQ ID NO: 1524 - DNA, 243 bp, Lagenorhynchus obliquidens; identical to SEQ ID NO: 422

SEQ ID NO: 1525 - DNA, 243 bp, Globicephala melas; identical to SEQ ID NO: 423

SEQ ID NO: 1526 - DNA, 243 bp, Orcinus orca; identical to SEQ ID NO: 424

SEQ ID NO: 1527 - DNA, 243 bp, Lipotes vexillifer; identical to SEQ ID NO: 425

SEQ ID NO: 1528 - DNA, 243 bp, Inia geoffrensis; identical to SEQ ID NO: 426

SEQ ID NO: 1529 - DNA, 242 bp, Pontoporia blainvillei; identical to SEQ ID NO: 427

SEQ ID NO: 1530 - DNA, 243 bp, Kogia breviceps; identical to SEQ ID NO: 429

SEQ ID NO: 1531 - DNA, 242 bp, Physeter catodon; identical to SEQ ID NO: 430

SEQ ID NO: 1532 - DNA, 242 bp, Mesoplodon bidens; identical to SEQ ID NO: 433

SEQ ID NO: 1533 - DNA, 242 bp, Ziphius cavirostris; identical to SEQ ID NO: 434

SEQ ID NO: 1534 - DNA, 255 bp, Felis catus; identical to SEQ ID NO: 475

SEQ ID NO: 1535 - DNA, 254 bp, Felis nigripes; identical to SEQ ID NO: 476

SEQ ID NO: 1536 - DNA, 254 bp, Felis catus; identical to SEQ ID NO: 477

SEQ ID NO: 1537 - DNA, 254 bp, Puma concolor; identical to SEQ ID NO: 479

SEQ ID NO: 1538 - DNA, 254 bp, Acinonyx jubatus; identical to SEQ ID NO: 481

SEQ ID NO: 1539 - DNA, 254 bp, Lynx pardinus; identical to SEQ ID NO: 483

SEQ ID NO: 1540 - DNA, 254 bp, Lynx canadensis; identical to SEQ ID NO: 484

SEQ ID NO: 1541 - DNA, 254 bp, Puma yagouaroundi; identical to SEQ ID NO: 485

SEQ ID NO: 1542 - DNA, 252 bp, Panthera onca; identical to SEQ ID NO: 486

SEQ ID NO: 1543 - DNA, 252 bp, Panthera pardus; identical to SEQ ID NO: 487

SEQ ID NO: 1544 - DNA, 252 bp, Panthera leo; identical to SEQ ID NO: 488

SEQ ID NO: 1545 - DNA, 252 bp, Panthera leo; identical to SEQ ID NO: 489

SEQ ID NO: 1546 - DNA, 252 bp, Panthera tigris; identical to SEQ ID NO: 490

SEQ ID NO: 1547 - DNA, 254 bp, Paradoxurus hermaphroditus; identical to SEQ ID NO: 491

SEQ ID NO: 1548 - DNA, 254 bp, Hyaena hyaena; identical to SEQ ID NO: 492

SEQ ID NO: 1549 - DNA, 254 bp, Crocuta crocuta; identical to SEQ ID NO: 494

SEQ ID NO: 1550 - DNA, 254 bp, Mungos mungo; identical to SEQ ID NO: 495

SEQ ID NO: 1551 - DNA, 254 bp, Helogale parvula; identical to SEQ ID NO: 496

SEQ ID NO: 1552 - DNA, 254 bp, Suricata suricatta; identical to SEQ ID NO: 497

SEQ ID NO: 1553 - DNA, 254 bp, Cryptoprocta ferox; identical to SEQ ID NO: 499

SEQ ID NO: 1554 - DNA, 252 bp, Ailurus fulgens; identical to SEQ ID NO: 500

SEQ ID NO: 1555 - DNA, 253 bp, Ursus americanus; identical to SEQ ID NO: 501

SEQ ID NO: 1556 - DNA, 253 bp, Ursus thibetanus; identical to SEQ ID NO: 502

SEQ ID NO: 1557 - DNA, 253 bp, Ursus thibetanus; identical to SEQ ID NO: 503

SEQ ID NO: 1558 - DNA, 253 bp, Ursus maritimus; identical to SEQ ID NO: 504

SEQ ID NO: 1559 - DNA, 253 bp, Ursus arctos; identical to SEQ ID NO: 505

SEQ ID NO: 1560 - DNA, 253 bp, Ailuropoda melanoleuca; identical to SEQ ID NO: 506

SEQ ID NO: 1561 - DNA, 253 bp, Taxidea taxus; identical to SEQ ID NO: 508

SEQ ID NO: 1562 - DNA, 254 bp, Mirounga angustirostris; identical to SEQ ID NO: 509

SEQ ID NO: 1563 - DNA, 254 bp, Mirounga leonina; identical to SEQ ID NO: 510

SEQ ID NO: 1564 - DNA, 254 bp, Leptonychotes weddellii; identical to SEQ ID NO: 511

SEQ ID NO: 1565 - DNA, 254 bp, Neomonachus schauinslandi; identical to SEQ ID NO: 512

SEQ ID NO: 1566 - DNA, 254 bp, Phoca vitulina; identical to SEQ ID NO: 513

SEQ ID NO: 1567 - DNA, 254 bp, Halichoerus grypus; identical to SEQ ID NO: 514

SEQ ID NO: 1568 - DNA, 254 bp, Zalophus californianus; identical to SEQ ID NO: 515

SEQ ID NO: 1569 - DNA, 254 bp, Callorhinus ursinus; identical to SEQ ID NO: 521

SEQ ID NO: 1570 - DNA, 254 bp, Odobenus rosmarus; identical to SEQ ID NO: 522

SEQ ID NO: 1571 - DNA, 254 bp, Pteronura brasiliensis; identical to SEQ ID NO: 523

SEQ ID NO: 1572 - DNA, 254 bp, Neogale vison; identical to SEQ ID NO: 524

SEQ ID NO: 1573 - DNA, 254 bp, Lontra canadensis; identical to SEQ ID NO: 525

SEQ ID NO: 1574 - DNA, 254 bp, Lutra lutra; identical to SEQ ID NO: 526

SEQ ID NO: 1575 - DNA, 253 bp, Enhydra lutris; identical to SEQ ID NO: 528

SEQ ID NO: 1576 - DNA, 254 bp, Martes zibellina; identical to SEQ ID NO: 530

SEQ ID NO: 1577 - DNA, 254 bp, Gulo gulo; identical to SEQ ID NO: 531

SEQ ID NO: 1578 - DNA, 254 bp, Mustela erminea; identical to SEQ ID NO: 532

SEQ ID NO: 1579 - DNA, 255 bp, Mustela putorius; identical to SEQ ID NO: 534

SEQ ID NO: 1580 - DNA, 254 bp, Mustela putorius; identical to SEQ ID NO: 535

SEQ ID NO: 1581 - DNA, 255 bp, Mustela putorius; identical to SEQ ID NO: 549

SEQ ID NO: 1582 - DNA, 255 bp, Mustela putorius; identical to SEQ ID NO: 550

SEQ ID NO: 1583 - DNA, 252 bp, Mustela putorius; identical to SEQ ID NO: 551

SEQ ID NO: 1584 - DNA, 253 bp, Mustela putorius; identical to SEQ ID NO: 553

SEQ ID NO: 1585 - DNA, 254 bp, Mustela putorius; identical to SEQ ID NO: 555

SEQ ID NO: 1586 - DNA, 250 bp, Mustela putorius; identical to SEQ ID NO: 556

SEQ ID NO: 1587 - DNA, 254 bp, Mellivora capensis; identical to SEQ ID NO: 557

SEQ ID NO: 1588 - DNA, 254 bp, Potos flavus; identical to SEQ ID NO: 558

SEQ ID NO: 1589 - DNA, 253 bp, Procyon lotor; identical to SEQ ID NO: 1503

SEQ ID NO: 1590 - DNA, 254 bp, Spilogale gracilis; identical to SEQ ID NO: 1504

SEQ ID NO: 1591 - DNA, 253 bp, Equus asinus; identical to SEQ ID NO: 735

SEQ ID NO: 1592 - DNA, 253 bp, Equus caballus; identical to SEQ ID NO: 738

SEQ ID NO: 1593 - DNA, 253 bp, Equus przewalskii; identical to SEQ ID NO: 739

SEQ ID NO: 1594 - DNA, 257 bp, Dicerorhinus sumatrensis; identical to SEQ ID NO: 740

SEQ ID NO: 1595 - DNA, 256 bp, Diceros bicornis; identical to SEQ ID NO: 742

SEQ ID NO: 1596 - DNA, 256 bp, Ceratotherium simum; identical to SEQ ID NO: 743

SEQ ID NO: 1597 - DNA, 256 bp, Diceros bicornis; identical to SEQ ID NO: 745

SEQ ID NO: 1598 - DNA, 256 bp, Tapirus indicus; identical to SEQ ID NO: 746

SEQ ID NO: 1599 - DNA, 256 bp, Tapirus terrestris; identical to SEQ ID NO: 747

SEQ ID NO: 1600 - DNA, 256 bp, Homo sapiens; identical to SEQ ID NO: 771

SEQ ID NO: 1601 - DNA, 256 bp, Gorilla gorilla; identical to SEQ ID NO: 766

SEQ ID NO: 1602 - DNA, 256 bp, Pan paniscus; identical to SEQ ID NO: 770

SEQ ID NO: 1603 - DNA, 255 bp, Pan troglodytes; identical to SEQ ID NO: 783

SEQ ID NO: 1604 - DNA, 256 bp, Nomascus leucogenys; identical to SEQ ID NO: 765

SEQ ID NO: 1605 - DNA, 257 bp, Papio anubis; identical to SEQ ID NO: 762

SEQ ID NO: 1606 - DNA, 256 bp, Macaca fascicularis; identical to SEQ ID NO: 768

SEQ ID NO: 1607 - DNA, 256 bp, Macaca mulatta; identical to SEQ ID NO: 778

SEQ ID NO: 1608 - DNA, 256 bp, Macaca mulatta; identical to SEQ ID NO: 773

SEQ ID NO: 1609 - DNA, 256 bp, Mandrillus leucophaeus; identical to SEQ ID NO: 777

SEQ ID NO: 1610 - DNA, 256 bp, Cercocebus atys; identical to SEQ ID NO: 776

SEQ ID NO: 1611 - DNA, 256 bp, Macaca nemestrina; identical to SEQ ID NO: 775

SEQ ID NO: 1612 - DNA, 256 bp, Rhinopithecus roxellana; identical to SEQ ID NO: 772

SEQ ID NO: 1613 - DNA, 256 bp, Rhinopithecus bieti; identical to SEQ ID NO: 767

SEQ ID NO: 1614 - DNA, 256 bp, Chlorocebus sabaeus; identical to SEQ ID NO: 774

SEQ ID NO: 1615 - DNA, 257 bp, Colobus angolensis; identical to SEQ ID NO: 764

SEQ ID NO: 1616 - DNA, 257 bp, Piliocolobus tephrosceles; identical to SEQ ID NO: 763

SEQ ID NO: 1617 - DNA, 255 bp, Pongo abelii; identical to SEQ ID NO: 779

SEQ ID NO: 1618 - DNA, 252 bp, Aotus nancymaae; identical to SEQ ID NO: 759

SEQ ID NO: 1619 - DNA, 254 bp, Saimiri boliviensis; identical to SEQ ID NO: 757

SEQ ID NO: 1620 - DNA, 254 bp, Callithrix jacchus; identical to SEQ ID NO: 758

SEQ ID NO: 1621 - DNA, 254 bp, Callithrix jacchus; identical to SEQ ID NO: 755

SEQ ID NO: 1622 - DNA, 254 bp, Cebus imitator; identical to SEQ ID NO: 756

SEQ ID NO: 1623 - DNA, 263 bp, Microcebus murinus; identical to SEQ ID NO: 760

SEQ ID NO: 1624 - DNA, 256 bp, Propithecus coquereli; identical to SEQ ID NO: 769

SEQ ID NO: 1625 - DNA, 252 bp, Eulemur flavifrons; identical to SEQ ID NO: 781

SEQ ID NO: 1626 - DNA, 254 bp, Carlito syrichta; identical to SEQ ID NO: 780

SEQ ID NO: 1627 - DNA, 262 bp, Otolemur garnettii; identical to SEQ ID NO: 761

SEQ ID NO: 1628 - DNA, 231 bp, Galeopterus variegatus; identical to SEQ ID NO: 680

SEQ ID NO: 1629 - DNA, 230 bp, Tupaia chinensis; identical to SEQ ID NO: 782

SEQ ID NO: 1630 - DNA, 261 bp, Manis pentadactyla; identical to SEQ ID NO: 725

SEQ ID NO: 1631 - DNA, 259 bp, Manis javanica; identical to SEQ ID NO: 726

SEQ ID NO: 1632 - DNA, 259 bp, Manis javanica; identical to SEQ ID NO: 727

SEQ ID NO: 1633 - DNA, 258 bp, Phataginus tricuspis; identical to SEQ ID NO: 728

SEQ ID NO: 1634 - DNA, 244 bp, Megaderma lyra; identical to SEQ ID NO: 615

SEQ ID NO: 1635 - DNA, 244 bp, Megaderma lyra; identical to SEQ ID NO: 616

SEQ ID NO: 1636 - DNA, 252 bp, Rhinolophus ferrumequinum; identical to SEQ ID NO: 617

SEQ ID NO: 1637 - DNA, 252 bp, Rhinolophus ferrumequinum; identical to SEQ ID NO: 619

SEQ ID NO: 1638 - DNA, 252 bp, Rhinolophus ferrumequinum; identical to SEQ ID NO: 620

SEQ ID NO: 1639 - DNA, 252 bp, Rhinolophus sinicus; identical to SEQ ID NO: 621

SEQ ID NO: 1640 - DNA, 252 bp, Hipposideros galeritus; identical to SEQ ID NO: 622

SEQ ID NO: 1641 - DNA, 255 bp, Hipposideros armiger; identical to SEQ ID NO: 623

SEQ ID NO: 1642 - DNA, 261 bp, Eonycteris spelaea; identical to SEQ ID NO: 624

SEQ ID NO: 1643 - DNA, 261 bp, Rousettus aegyptiacus; identical to SEQ ID NO: 625

SEQ ID NO: 1644 - DNA, 262 bp, Rousettus leschenaultii; identical to SEQ ID NO: 629

SEQ ID NO: 1645 - DNA, 262 bp, Pteropus pselaphon; identical to SEQ ID NO: 630

SEQ ID NO: 1646 - DNA, 262 bp, Pteropus vampyrus; identical to SEQ ID NO: 631

SEQ ID NO: 1647 - DNA, 263 bp, Pteropus giganteus; identical to SEQ ID NO: 632

SEQ ID NO: 1648 - DNA, 262 bp, Pteropus alecto; identical to SEQ ID NO: 633

SEQ ID NO: 1649 - DNA, 262 bp, Macroglossus sobrinus; identical to SEQ ID NO: 634

SEQ ID NO: 1650 - DNA, 219 bp, Cynopterus brachyotis; identical to SEQ ID NO: 635

SEQ ID NO: 1651 - DNA, 255 bp, Pteronotus parnellii; identical to SEQ ID NO: 636

SEQ ID NO: 1652 - DNA, 253 bp, Tonatia saurophila; identical to SEQ ID NO: 637

SEQ ID NO: 1653 - DNA, 251 bp, Phyllostomus discolor; identical to SEQ ID NO: 638

SEQ ID NO: 1654 - DNA, 251 bp, Phyllostomus discolor; identical to SEQ ID NO: 639

SEQ ID NO: 1655 - DNA, 252 bp, Micronycteris hirsuta; identical to SEQ ID NO: 640

SEQ ID NO: 1656 - DNA, 255 bp, Macrotus californicus; identical to SEQ ID NO: 641

SEQ ID NO: 1657 - DNA, 253 bp, Anoura caudifer; identical to SEQ ID NO: 642

SEQ ID NO: 1658 - DNA, 252 bp, Artibeus jamaicensis; identical to SEQ ID NO: 643

SEQ ID NO: 1659 - DNA, 252 bp, Artibeus jamaicensis; identical to SEQ ID NO: 644

SEQ ID NO: 1660 - DNA, 252 bp, Sturnira hondurensis; identical to SEQ ID NO: 645

SEQ ID NO: 1661 - DNA, 252 bp, Carollia perspicillata; identical to SEQ ID NO: 646

SEQ ID NO: 1662 - DNA, 253 bp, Mormoops blainvillei; identical to SEQ ID NO: 647

SEQ ID NO: 1663 - DNA, 250 bp, Desmodus rotundus; identical to SEQ ID NO: 648

SEQ ID NO: 1664 - DNA, 225 bp, Tadarida brasiliensis; identical to SEQ ID NO: 649

SEQ ID NO: 1665 - DNA, 239 bp, Molossus molossus; identical to SEQ ID NO: 650

SEQ ID NO: 1666 - DNA, 256 bp, Miniopterus schreibersii; identical to SEQ ID NO: 651

SEQ ID NO: 1667 - DNA, 256 bp, Miniopterus natalensis; identical to SEQ ID NO: 652

SEQ ID NO: 1668 - DNA, 256 bp, Pipistrellus pipistrellus; identical to SEQ ID NO: 653

SEQ ID NO: 1669 - DNA, 256 bp, Pipistrellus pipistrellus; identical to SEQ ID NO: 654

SEQ ID NO: 1670 - DNA, 254 bp, Pipistrellus pipistrellus; identical to SEQ ID NO: 655

SEQ ID NO: 1671 - DNA, 256 bp, Pipistrellus pipistrellus; identical to SEQ ID NO: 656

SEQ ID NO: 1672 - DNA, 257 bp, Pipistrellus kuhlii; identical to SEQ ID NO: 657

SEQ ID NO: 1673 - DNA, 255 bp, Lasiurus borealis; identical to SEQ ID NO: 658

SEQ ID NO: 1674 - DNA, 254 bp, Aeorestes cinereus; identical to SEQ ID NO: 659

SEQ ID NO: 1675 - DNA, 255 bp, Aeorestes cinereus; identical to SEQ ID NO: 660

SEQ ID NO: 1676 - DNA, 257 bp, Eptesicus fuscus; identical to SEQ ID NO: 661

SEQ ID NO: 1677 - DNA, 256 bp, Nycticeius humeralis; identical to SEQ ID NO: 662

SEQ ID NO: 1678 - DNA, 225 bp, Murina aurata; identical to SEQ ID NO: 663

SEQ ID NO: 1679 - DNA, 256 bp, Myotis myotis; identical to SEQ ID NO: 664

SEQ ID NO: 1680 - DNA, 256 bp, Myotis lucifugus; identical to SEQ ID NO: 666

SEQ ID NO: 1681 - DNA, 256 bp, Myotis brandtii; identical to SEQ ID NO: 667

SEQ ID NO: 1682 - DNA, 256 bp, Myotis davidii; identical to SEQ ID NO: 668

SEQ ID NO: 1683 - DNA, 256 bp, Antrozous pallidus; identical to SEQ ID NO: 669

SEQ ID NO: 1684 - DNA, 252 bp, Noctilio leporinus; identical to SEQ ID NO: 670

SEQ ID NO: 1685 - DNA, 220 bp, Craseonycteris thonglongyai; identical to SEQ ID NO: 671

SEQ ID NO: 1686 - DNA, 240 bp, Choloepus hoffmanni; identical to SEQ ID NO: 910

SEQ ID NO: 1687 - DNA, 239 bp, Choloepus didactylus; identical to SEQ ID NO: 911

SEQ ID NO: 1688 - DNA, 239 bp, Choloepus didactylus; identical to SEQ ID NO: 912

SEQ ID NO: 1689 - DNA, 239 bp, Choloepus didactylus; identical to SEQ ID NO: 913

SEQ ID NO: 1690 - DNA, 238 bp, Bradypus variegatus; identical to SEQ ID NO: 914

SEQ ID NO: 1691 - DNA, 238 bp, Tamandua tetradactyla; identical to SEQ ID NO: 915

SEQ ID NO: 1692 - DNA, 238 bp, Myrmecophaga tridactyla; identical to SEQ ID NO: 916

SEQ ID NO: 1693 - DNA, 237 bp, Tolypeutes matacus; identical to SEQ ID NO: 917

SEQ ID NO: 1694 - DNA, 237 bp, Chaetophractus vellerosus; identical to SEQ ID NO: 918

SEQ ID NO: 1695 - DNA, 236 bp, Dasypus novemcinctus; identical to SEQ ID NO: 919

SEQ ID NO: 1696 - DNA, 237 bp, Erinaceus europaeus; identical to SEQ ID NO: 684

SEQ ID NO: 1697 - DNA, 237 bp, Erinaceus europaeus; identical to SEQ ID NO: 685

SEQ ID NO: 1698 - DNA, 258 bp, Solenodon paradoxus; identical to SEQ ID NO: 686

SEQ ID NO: 1699 - DNA, 258 bp, Solenodon paradoxus; identical to SEQ ID NO: 687

SEQ ID NO: 1700 - DNA, 251 bp, Scalopus aquaticus; identical to SEQ ID NO: 688

SEQ ID NO: 1701 - DNA, 271 bp, Condylura cristata; identical to SEQ ID NO: 689

SEQ ID NO: 1702 - DNA, 246 bp, Uropsilus gracilis; identical to SEQ ID NO: 690

SEQ ID NO: 1703 - DNA, 229 bp, Sorex araneus; identical to SEQ ID NO: 691

SEQ ID NO: 1704 - DNA, 236 bp, Ochotona princeps; identical to SEQ ID NO: 698

SEQ ID NO: 1705 - DNA, 236 bp, Ochotona princeps; identical to SEQ ID NO: 699

SEQ ID NO: 1706 - DNA, 237 bp, Lepus americanus; identical to SEQ ID NO: 700

SEQ ID NO: 1707 - DNA, 237 bp, Lepus timidus; identical to SEQ ID NO: 701

SEQ ID NO: 1708 - DNA, 236 bp, Oryctolagus cuniculus; identical to SEQ ID NO: 702

SEQ ID NO: 1709 - DNA, 236 bp, Oryctolagus cuniculus; identical to SEQ ID NO: 703

SEQ ID NO: 1710 - DNA, 233 bp, Oryctolagus cuniculus; identical to SEQ ID NO: 704

SEQ ID NO: 1711 - DNA, 237 bp, Sylvilagus bachmani; identical to SEQ ID NO: 705

SEQ ID NO: 1712 - DNA, 201 bp, Mus musculus; identical to SEQ ID NO: 790

SEQ ID NO: 1713 - DNA, 201 bp, Mus musculus; identical to SEQ ID NO: 796

SEQ ID NO: 1714 - DNA, 201 bp, Mus musculus; identical to SEQ ID NO: 798

SEQ ID NO: 1715 - DNA, 201 bp, Mus spretus; identical to SEQ ID NO: 799

SEQ ID NO: 1716 - DNA, 201 bp, Mus spicilegus; identical to SEQ ID NO: 800

SEQ ID NO: 1717 - DNA, 201 bp, Mus caroli; identical to SEQ ID NO: 802

SEQ ID NO: 1718 - DNA, 201 bp, Mus minutoides; identical to SEQ ID NO: 804

SEQ ID NO: 1719 - DNA, 201 bp, Mus minutoides; identical to SEQ ID NO: 806

SEQ ID NO: 1720 - DNA, 208 bp, Mus pahari; identical to SEQ ID NO: 807

SEQ ID NO: 1721 - DNA, 201 bp, Rattus rattus; identical to SEQ ID NO: 809

SEQ ID NO: 1722 - DNA, 201 bp, Rattus norvegicus; identical to SEQ ID NO: 811

SEQ ID NO: 1723 - DNA, 200 bp, Apodemus sylvaticus; identical to SEQ ID NO: 813

SEQ ID NO: 1724 - DNA, 238 bp, Apodemus speciosus; identical to SEQ ID NO: 814

SEQ ID NO: 1725 - DNA, 200 bp, Grammomys surdaster; identical to SEQ ID NO: 815

SEQ ID NO: 1726 - DNA, 200 bp, Arvicanthis niloticus; identical to SEQ ID NO: 816

SEQ ID NO: 1727 - DNA, 200 bp, Mastomys coucha; identical to SEQ ID NO: 817

SEQ ID NO: 1728 - DNA, 204 bp, Cricetulus griseus; identical to SEQ ID NO: 818

SEQ ID NO: 1729 - DNA, 212 bp, Mesocricetus auratus; identical to SEQ ID NO: 823

SEQ ID NO: 1730 - DNA, 202 bp, Phodopus sungorus; identical to SEQ ID NO: 824

SEQ ID NO: 1731 - DNA, 213 bp, Peromyscus maniculatus; identical to SEQ ID NO: 825

SEQ ID NO: 1732 - DNA, 213 bp, Peromyscus maniculatus; identical to SEQ ID NO: 826

SEQ ID NO: 1733 - DNA, 213 bp, Peromyscus polionotus; identical to SEQ ID NO: 827

SEQ ID NO: 1734 - DNA, 213 bp, Peromyscus leucopus; identical to SEQ ID NO: 828

SEQ ID NO: 1735 - DNA, 208 bp, Peromyscus californicus; identical to SEQ ID NO: 829

SEQ ID NO: 1736 - DNA, 205 bp, Onychomys torridus; identical to SEQ ID NO: 830

SEQ ID NO: 1737 - DNA, 205 bp, Peromyscus attwateri; identical to SEQ ID NO: 831

SEQ ID NO: 1738 - DNA, 202 bp, Sigmodon hispidus; identical to SEQ ID NO: 832

SEQ ID NO: 1739 - DNA, 201 bp, Acomys cahirinus; identical to SEQ ID NO: 833

SEQ ID NO: 1740 - DNA, 201 bp, Acomys russatus; identical to SEQ ID NO: 834

SEQ ID NO: 1741 - DNA, 193 bp, Psammomys obesus; identical to SEQ ID NO: 835

SEQ ID NO: 1742 - DNA, 194 bp, Rhombomys opimus; identical to SEQ ID NO: 836

SEQ ID NO: 1743 - DNA, 194 bp, Meriones unguiculatus; identical to SEQ ID NO: 837

SEQ ID NO: 1744 - DNA, 200 bp, Cricetomys gambianus; identical to SEQ ID NO: 842

SEQ ID NO: 1745 - DNA, 225 bp, Microtus agrestis; identical to SEQ ID NO: 843

SEQ ID NO: 1746 - DNA, 225 bp, Microtus agrestis; identical to SEQ ID NO: 845

SEQ ID NO: 1747 - DNA, 225 bp, Microtus oeconomus; identical to SEQ ID NO: 846

SEQ ID NO: 1748 - DNA, 224 bp, Microtus fortis; identical to SEQ ID NO: 847

SEQ ID NO: 1749 - DNA, 224 bp, Microtus arvalis; identical to SEQ ID NO: 848

SEQ ID NO: 1750 - DNA, 248 bp, Marmota marmota; identical to SEQ ID NO: 849

SEQ ID NO: 1751 - DNA, 248 bp, Marmota himalayana; identical to SEQ ID NO: 851

SEQ ID NO: 1752 - DNA, 248 bp, Marmota monax; identical to SEQ ID NO: 852

SEQ ID NO: 1753 - DNA, 247 bp, Marmota flaviventris; identical to SEQ ID NO: 854

SEQ ID NO: 1754 - DNA, 248 bp, Spermophilus dauricus; identical to SEQ ID NO: 855

SEQ ID NO: 1755 - DNA, 248 bp, Ictidomys tridecemlineatus; identical to SEQ ID NO: 856

SEQ ID NO: 1756 - DNA, 248 bp, Cynomys gunnisoni; identical to SEQ ID NO: 858

SEQ ID NO: 1757 - DNA, 248 bp, Urocitellus parryii; identical to SEQ ID NO: 859

SEQ ID NO: 1758 - DNA, 254 bp, Neosciurus carolinensis; identical to SEQ ID NO: 860

SEQ ID NO: 1759 - DNA, 254 bp, Sciurus vulgaris; identical to SEQ ID NO: 862

SEQ ID NO: 1760 - DNA, 254 bp, Xerus inauris; identical to SEQ ID NO: 863

SEQ ID NO: 1761 - DNA, 257 bp, Aplodontia rufa; identical to SEQ ID NO: 864

SEQ ID NO: 1762 - DNA, 254 bp, Pedetes capensis; identical to SEQ ID NO: 865

SEQ ID NO: 1763 - DNA, 238 bp, Muscardinus avellanarius; identical to SEQ ID NO: 866

SEQ ID NO: 1764 - DNA, 245 bp, Glis glis; identical to SEQ ID NO: 867

SEQ ID NO: 1765 - DNA, 264 bp, Graphiurus murinus; identical to SEQ ID NO: 868

SEQ ID NO: 1766 - DNA, 237 bp, Tympanoctomys barrerae; identical to SEQ ID NO: 869

SEQ ID NO: 1767 - DNA, 236 bp, Octomys mimax; identical to SEQ ID NO: 870

SEQ ID NO: 1768 - DNA, 238 bp, Octodon degus; identical to SEQ ID NO: 871

SEQ ID NO: 1769 - DNA, 241 bp, Ctenomys sociabilis; identical to SEQ ID NO: 872

SEQ ID NO: 1770 - DNA, 249 bp, Dolichotis patagonum; identical to SEQ ID NO: 873

SEQ ID NO: 1771 - DNA, 250 bp, Artificial Sequence; identical to SEQ ID NO: 874
  Description of Artificial Sequence: Synthetic polynucleotide

SEQ ID NO: 1772 - DNA, 250 bp, Hydrochoerus hydrochaeris; identical to SEQ ID NO: 876

SEQ ID NO: 1773 - DNA, 250 bp, Hydrochoerus hydrochaeris; identical to SEQ ID NO: 877

SEQ ID NO: 1774 - DNA, 250 bp, Hydrochoerus hydrochaeris; identical to SEQ ID NO: 878

SEQ ID NO: 1775 - DNA, 249 bp, Hydrochoerus hydrochaeris; identical to SEQ ID NO: 879

SEQ ID NO: 1776 - DNA, 251 bp, Cuniculus paca; identical to SEQ ID NO: 880

SEQ ID NO: 1777 - DNA, 250 bp, Dasyprocta punctata; identical to SEQ ID NO: 881

SEQ ID NO: 1778 - DNA, 237 bp, Dinomys branickii; identical to SEQ ID NO: 882

SEQ ID NO: 1779 - DNA, 252 bp, Erethizon dorsatum; identical to SEQ ID NO: 883

SEQ ID NO: 1780 - DNA, 251 bp, Chinchilla lanigera; identical to SEQ ID NO: 884

SEQ ID NO: 1781 - DNA, 260 bp, Heterocephalus glaber; identical to SEQ ID NO: 885

SEQ ID NO: 1782 - DNA, 260 bp, Heterocephalus glaber; identical to SEQ ID NO: 887

SEQ ID NO: 1783 - DNA, 252 bp, Fukomys damarensis; identical to SEQ ID NO: 888

SEQ ID NO: 1784 - DNA, 230 bp, Hystrix cristata; identical to SEQ ID NO: 890

SEQ ID NO: 1785 - DNA, 239 bp, Myocastor coypus; identical to SEQ ID NO: 891

SEQ ID NO: 1786 - DNA, 248 bp, Thryonomys swinderianus; identical to SEQ ID NO: 892

SEQ ID NO: 1787 - DNA, 256 bp, Petromus typicus; identical to SEQ ID NO: 893

SEQ ID NO: 1788 - DNA, 253 bp, Ctenodactylus gundi; identical to SEQ ID NO: 894

SEQ ID NO: 1789 - DNA, 240 bp, Castor canadensis; identical to SEQ ID NO: 895

SEQ ID NO: 1790 - DNA, 236 bp, Oryctolagus cuniculus; identical to SEQ ID NO: 703

SEQ ID NO: 1791 - DNA, 256 bp, Dipodomys stephensi; identical to SEQ ID NO: 900

SEQ ID NO: 1792 - DNA, 257 bp, Dipodomys ordii; identical to SEQ ID NO: 901

SEQ ID NO: 1793 - DNA, 245 bp, Perognathus longimembris; identical to SEQ ID NO: 902

SEQ ID NO: 1794 - DNA, 209 bp, Nannospalax galili; identical to SEQ ID NO: 903

SEQ ID NO: 1795 - DNA, 263 bp, Monodelphis domestica; identical to SEQ ID NO: 712

SEQ ID NO: 1796 - DNA, 272 bp, Sarcophilus harrisii; identical to SEQ ID NO: 714

SEQ ID NO: 1797 - DNA, 269 bp, Trichosurus vulpecula; identical to SEQ ID NO: 717

SEQ ID NO: 1798 - DNA, 269 bp, Trichosurus vulpecula; identical to SEQ ID NO: 718

SEQ ID NO: 1799 - DNA, 254 bp, Artificial Sequence; identical to SEQ ID NO: 522
  Description of Artificial Sequence: Synthetic polynucleotide

SEQ ID NO: 1800 - DNA, 261 bp, Artificial Sequence
  Description of Artificial Sequence: Synthetic polynucleotide
tgagcttccctccgtcctatgagccaaacaactgttggtcacattatataagaatcccatatataaagacatttctggcgtagggtgacttcccacaatacatagcgacatgcaaatatcatggtcctccaggaggcgtgcctccccgtccccttggtccaggtcttgctggggcgcacgcgcgctgcgtgttcccgctctgtgactcatctcgcgattcctgagagcggattggtgaagtcaatgttctggctccatggc

SEQ ID NO: 1801 - DNA, 394 bp, Orycteropus afer
tgagcttccctccgccctacggaacgaaactaacttggccaaactatataagaatgccatagctttcaacatttaatggttagggtgccttctcatagtttgcataactcattgccatcgagtcaattccgactcgtagcgaccgtatatgttatcaaaatcagggcagtggcaattatttctttggtaacttttctaaaaccatcttgaaatacatctttaaacaacaatacacagcgacatgcaaatatcatggcccttccaggaggcgtgcctccccgtcccgcgtgtgcgtcttgcttgtgcgcaggcgcgctgctcttccggctgtaagactttgagcccttgatttctgtgagcgggttcgtgaagtcagtgttctggctccatggcg

SEQ ID NO: 1802-1807 - skipped (6 entries)

SEQ ID NO: 1808 - DNA, 399 bp, Artificial Sequence
  Description of Artificial Sequence: Synthetic polynucleotide
tgagcttccctccgccctayggramraarykrwctyrkmcaramywtataagawtsccawakcywwmracatttmaygkttakggtgmyttcycatagtttgcataactcattgccatcgagtcaattccgactcgtagcgaccgtatatgttatcaaaatcagggcagtggcaattatttctttggtaacttttctaaaaccatcttgaaatacatctttaaacaasaayacayagcgacatgcaaatatcatggcccttcyrsrrggcgysmctcccckkyccsysacagyswkcktcytgcywgkgcgcasgcgcgctgsktsttccsgcykwrwgacwytgrgccckygattyctkkgagcgggttsrtgamgtcagygttckrrytccatggcg

SEQ ID NO: 1809 - DNA, 253 bp, Procyon lotor; identical to SEQ ID NO: 1503

SEQ ID NO: 1810 - DNA, 254 bp, Spilogale gracilis; identical to SEQ ID NO: 1504

SEQ ID NO: 1811-1867 - skipped (57 entries)

SEQ ID NO: 1868 - DNA, 256 bp, Artificial Sequence
  Description of Artificial Sequence: Synthetic polynucleotide
  modified_base (39)..(39): a, c, t, or g
  modified_base (145)..(145): a, c, t, or g
tgagcttccctccgccctatgrgraarrgtggtycyayncagaacttataagrytcccawayyyaaagacatttcwcgwttatggtgayttcccagaabacayagcgacatgcaaatattgyagggcgtsmcwcccctgtccctnacrgycrtcttcctgccagggcgcacgcgcgctgsgtgttcccgcstagtgacdctgggcccgcgattccttggagcgggttgatgacgtcagcgttcgaattccatggcg

SEQ ID NO: 1869 - DNA, 135 bp, Macaca nemestrina
cccaccccgcctctggaagagaaggcggatccctaacgccagctatctccaagagcaacattgccgcagcacttccgggacgtcgtgctgcgaaggacgcagatattatacgtcacttccacggcgcggcgttag

SEQ ID NO: 1870 - DNA, 135 bp, Colobus angolensis
cctgccccgcctctgggagagaaggcggatccctaacgccagctatctccaagagcgacattgcctcagcacttccgggacgtcgtactgcaaaggacgcagttattatacgtcacttccacggcgccgcgttag

SEQ ID NO: 1871 - DNA, 135 bp, Piliocolobus tephrosceles
cctgctccgcctctgggagagaaggcggatccttaacgccagctatctcctagagcaacattgcctcagcacttccgggacgtcgagctgcaaaggacgcagttattatacgtcacttccagggcgccgcgttag

SEQ ID NO: 1872 - DNA, 135 bp, Rhinopithecus bieti
cctgccccgcctctgggagagaaggcggatccctaacgccagctatctccaagagcgacattgcctcagcacttccgggacgtagtgctgcaaaggacgcagttattatacgtcacttccacggcgccgcgttag

SEQ ID NO: 1873 - DNA, 130 bp, Aotus nancymaae
cccgccccgcccctgggacagagggcggatctctaacgccaactatctccaagagcaacattgccgcagcacttccgggacgtcgtgctgcaaaggacgccgctattatacgtcacttccgcggctccag

SEQ ID NO: 1874 - DNA, 134 bp, Cebus capucinus
cccgccccgcccctgggagagagggcggatctctaacgccaactgtctccaagagcaacattgccgcagcacttccgggacgtcgtcctgcaaaggacgccgctattatacgtcacttctgctgctcactgtag

SEQ ID NO: 1875 - DNA, 135 bp, Saimiri boliviensis
cccgccccgcccctgggagagagggcggatctctaacgccaactatctccaagagcaacatttcagcagcacttccaggacgtcgccctgcaaaggacgccgctattatacgtcacttccgctgctccactctgg

SEQ ID NO: 1876 - DNA, 121 bp, Carlito syrichta
cctgccccgcctctagagaaggggacggattcgtaatgcccggcaatcgcgcagccgcatttccgggacgtcacgaggaaagggcgccgaattgtatgtcatttccgcttttcatggctgg

SEQ ID NO: 1877 - DNA, 122 bp, Otolemur garnettii
ctcggccagtctcaggcagaaagggcggaaaccggaccccagcgcaatgtcacggcagcacttccggtatgctccgttgcaaaagacgctgctattgtacgtcacttccgccacccggctgg

SEQ ID NO: 1878 - DNA, 133 bp, Prolemur simus
cccgccccgcctctcggagacggggcgcgtccctcccgccgccgtctcccggggcaacatggcggcagcacttccggggcgccggtggcgaaaggcgccgctattatacgtcacttccgccgcccggcgcgag

SEQ ID NO: 1879 - DNA, 240 bp, Artificial Sequence
  Description of Artificial Sequence: Synthetic polynucleotide
ggggagaaaggggcttcacgcggaatatataaggctcccgtacctaaaggcctttcacggttagggtgacttccccacaatacatagcgacatgcaaatatagttgggcgtgcctcccctgtcccttgcgggcatcttctcgccaggacacgcgcgcgccgcgctgcgtgttcccgccttttgacttccaggcgggcgaatcctgggagagggttggatgacgtccaacattcgggctcc

SEQ ID NO: 1880-1881 - skipped (2 entries)

SEQ ID NO: 1882 - DNA, 123 bp, Homo sapiens
tgagcttccctccgccctatgggaaaaagtggtctcatacagaacttataagattcccaaatccaaagacatttcacgtttatggtgatttcccagaacacatagcgacatgcaaatattgca

SEQ ID NO: 1883 - DNA, 133 bp, Homo sapiens
gggcgccactcccctgtccctcacagccatcttcctgccagggcgcacgcgcgctgggtgttcccgcctagtgacactgggcccgcgattccttggagcgggttgatgacgtcagcgttcgaattccatggcg

SEQ ID NO: 1884 - DNA, 256 bp, Homo sapiens; identical to SEQ ID NO: 771

SEQ ID NO: 1885 - DNA, 394 bp, Orycteropus afer; identical to SEQ ID NO: 1801

SEQ ID NO: 1886 - DNA, 165 bp, Artificial Sequence
  Description of Artificial Sequence: Synthetic polynucleotide
agaccggccgccactataaggctcgaaagaggaataaatttttcgtttagggtgatttcccacaaagcacagcgcgtaattgcatgcgctctaccccaggctcctgtgctagacaagaagcccgcgcatccgggcaagggatgatgacgtcgtccttcaagagcg

SEQ ID NO: 1887 - DNA, 155 bp, Artificial Sequence
  Description of Artificial Sequence: Synthetic polynucleotide
ccactataaggctcgaaagaggaataaatttttcgtttagggtgatttcccacaaagcacagcgcgtaattgcatgcgctctaccccaggctcctgtgctagacaagaagcccgcgcatccgggcaagggatgatgacgtcgtccttcaagagcg

SEQ ID NO: 1888 - DNA, 145 bp, Artificial Sequence
  Description of Artificial Sequence: Synthetic polynucleotide
gctcgaaagaggaataaatttttcgtttagggtgatttcccacaaagcacagcgcgtaattgcatgcgctctaccccaggctcctgtgctagacaagaagcccgcgcatccgggcaagggatgatgacgtcgtccttcaagagcg

SEQ ID NO: 1889 - DNA, 135 bp, Artificial Sequence
  Description of Artificial Sequence: Synthetic polynucleotide
ggaataaatttttcgtttagggtgatttcccacaaagcacagcgcgtaattgcatgcgctctaccccaggctcctgtgctagacaagaagcccgcgcatccgggcaagggatgatgacgtcgtccttcaagagcg

SEQ ID NO: 1890 - DNA, 125 bp, Artificial Sequence
  Description of Artificial Sequence: Synthetic polynucleotide
tttcgtttagggtgatttcccacaaagcacagcgcgtaattgcatgcgctctaccccaggctcctgtgctagacaagaagcccgcgcatccgggcaagggatgatgacgtcgtccttcaagagcg

SEQ ID NO: 1891 - DNA, 115 bp, Artificial Sequence
  Description of Artificial Sequence: Synthetic polynucleotide
ggtgatttcccacaaagcacagcgcgtaattgcatgcgctctaccccaggctcctgtgctagacaagaagcccgcgcatccgggcaagggatgatgacgtcgtccttcaagagcg

SEQ ID NO: 1892 - DNA, 105 bp, Artificial Sequence
  Description of Artificial Sequence: Synthetic polynucleotide
cacaaagcacagcgcgtaattgcatgcgctctaccccaggctcctgtgctagacaagaagcccgcgcatccgggcaagggatgatgacgtcgtccttcaagagcg

SEQ ID NO: 1893 - DNA, 120 bp, Artificial Sequence
  Description of Artificial Sequence: Synthetic polynucleotide
acatcctgaaagaccggccgccactataaggctcgaaagaggaataaatttttcgtttagggtgatttcccacaaagcacagcgcgtaattgcatgcgctctaccccaggctcctgtgct

SEQ ID NO: 1894 - DNA, 175 bp, Artificial Sequence
  Description of Artificial Sequence: Synthetic polynucleotide
ttcaggatgtcggccggtctccactataaggctcgaaagaggaataaatttttcgtttagggtgatttcccacaaagcacagcgcgtaattgcatgcgctctaccccaggctcctgtgctagacaagaagcccgcgcatccgggcaagggatgatgacgtcgtccttcaagagcg

SEQ ID NO: 1895 - DNA, 175 bp, Artificial Sequence
  Description of Artificial Sequence: Synthetic polynucleotide
ttcaggatgtagaccggccgcttatagtgggctcgaaagaggaataaatttttcgtttagggtgatttcccacaaagcacagcgcgtaattgcatgcgctctaccccaggctcctgtgctagacaagaagcccgcgcatccgggcaagggatgatgacgtcgtccttcaagagcg

SEQ ID NO: 1896 - DNA, 175 bp, Artificial Sequence
  Description of Artificial Sequence: Synthetic polynucleotide
ttcaggatgtagaccggccgccactataagtctttcgagcggaataaatttttcgtttagggtgatttcccacaaagcacagcgcgtaattgcatgcgctctaccccaggctcctgtgctagacaagaagcccgcgcatccgggcaagggatgatgacgtcgtccttcaagagcg

SEQ ID NO: 1897 - DNA, 175 bp, Artificial Sequence
  Description of Artificial Sequence: Synthetic polynucleotide
ttcaggatgtagaccggccgccactataaggctcgaaagaaatttattcctttcgtttagggtgatttcccacaaagcacagcgcgtaattgcatgcgctctaccccaggctcctgtgctagacaagaagcccgcgcatccgggcaagggatgatgacgtcgtccttcaagagcg

SEQ ID NO: 1898 - DNA, 175 bp, Artificial Sequence
  Description of Artificial Sequence: Synthetic polynucleotide
ttcaggatgtagaccggccgccactataaggctcgaaagaggaataaattctaaacgaaaggtgatttcccacaaagcacagcgcgtaattgcatgcgctctaccccaggctcctgtgctagacaagaagcccgcgcatccgggcaagggatgatgacgtcgtccttcaagagcg

SEQ ID NO: 1899 - DNA, 175 bp, Artificial Sequence
  Description of Artificial Sequence: Synthetic polynucleotide
ttcaggatgtagaccggccgccactataaggctcgaaagaggaataaatttttcgtttagggaaatcacccacaaagcacagcgcgtaattgcatgcgctctaccccaggctcctgtgctagacaagaagcccgcgcatccgggcaagggatgatgacgtcgtccttcaagagcg

SEQ ID NO: 1900 - DNA, 175 bp, Artificial Sequence
  Description of Artificial Sequence: Synthetic polynucleotide
ttcaggatgtagaccggccgccactataaggctcgaaagaggaataaatttttcgtttagggtgatttccgtgctttgtgagcgcgtaattgcatgcgctctaccccaggctcctgtgctagacaagaagcccgcgcatccgggcaagggatgatgacgtcgtccttcaagagcg

SEQ ID NO: 1901 - DNA, 175 bp, Artificial Sequence
  Description of Artificial Sequence: Synthetic polynucleotide
ttcaggatgtagaccggccgccactataaggctcgaaagaggaataaatttttcgtttagggtgatttcccacaaagcacattacgcgcttgcatgcgctctaccccaggctcctgtgctagacaagaagcccgcgcatccgggcaagggatgatgacgtcgtccttcaagagcg

SEQ ID NO: 1902 - DNA, 175 bp, Artificial Sequence
  Description of Artificial Sequence: Synthetic polynucleotide
ttcaggatgtagaccggccgccactataaggctcgaaagaggaataaatttttcgtttagggtgatttcccacaaagcacagcgcgtaatagcgcatgcactaccccaggctcctgtgctagacaagaagcccgcgcatccgggcaagggatgatgacgtcgtccttcaagagcg

SEQ ID NO: 1903 - DNA, 175 bp, Artificial Sequence
  Description of Artificial Sequence: Synthetic polynucleotide
ttcaggatgtagaccggccgccactataaggctcgaaagaggaataaatttttcgtttagggtgatttcccacaaagcacagcgcgtaattgcatgcgctcctggggtagctcctgtgctagacaagaagcccgcgcatccgggcaagggatgatgacgtcgtccttcaagagcg

SEQ ID NO: 1904 - DNA, 175 bp, Artificial Sequence
  Description of Artificial Sequence: Synthetic polynucleotide
ttcaggatgtagaccggccgccactataaggctcgaaagaggaataaatttttcgtttagggtgatttcccacaaagcacagcgcgtaattgcatgcgctctaccccaggagcacaggagagacaagaagcccgcgcatccgggcaagggatgatgacgtcgtccttcaagagcg

SEQ ID NO: 1905 - DNA, 175 bp, Artificial Sequence
  Description of Artificial Sequence: Synthetic polynucleotide
ttcaggatgtagaccggccgccactataaggctcgaaagaggaataaatttttcgtttagggtgatttcccacaaagcacagcgcgtaattgcatgcgctctaccccaggctcctgtgctcttcttgtctcccgcgcatccgggcaagggatgatgacgtcgtccttcaagagcg

SEQ ID NO: 1906 - DNA, 175 bp, Artificial Sequence
  Description of Artificial Sequence: Synthetic polynucleotide
ttcaggatgtagaccggccgccactataaggctcgaaagaggaataaatttttcgtttagggtgatttcccacaaagcacagcgcgtaattgcatgcgctctaccccaggctcctgtgctagacaagaaggatgcgcgggcgggcaagggatgatgacgtcgtccttcaagagcg

SEQ ID NO: 1907 - DNA, 175 bp, Artificial Sequence
  Description of Artificial Sequence: Synthetic polynucleotide
ttcaggatgtagaccggccgccactataaggctcgaaagaggaataaatttttcgtttagggtgatttcccacaaagcacagcgcgtaattgcatgcgctctaccccaggctcctgtgctagacaagaagcccgcgcatccccttgcccgatgatgacgtcgtccttcaagagcg

SEQ ID NO: 1908 - DNA, 175 bp, Artificial Sequence
  Description of Artificial Sequence: Synthetic polynucleotide
ttcaggatgtagaccggccgccactataaggctcgaaagaggaataaatttttcgtttagggtgatttcccacaaagcacagcgcgtaattgcatgcgctctaccccaggctcctgtgctagacaagaagcccgcgcatccgggcaagggacgtcatcatcgtccttcaagagcg

SEQ ID NO: 1909 - DNA, 175 bp, Artificial Sequence
  Description of Artificial Sequence: Synthetic polynucleotide
ttcaggatgtagaccggccgccactataaggctcgaaagaggaataaatttttcgtttagggtgatttcccacaaagcacagcgcgtaattgcatgcgctctaccccaggctcctgtgctagacaagaagcccgcgcatccgggcaagggatgatgacgtttgaaggacggagcg

SEQ ID NO: 1910 - DNA, 280 bp, Artificial Sequence
  Description of Artificial Sequence: Synthetic polynucleotide
gggaaaaagtggtctcatacagaacttmkaagattcccaaatccaaagacatttcacgtttatggtgatttcccagaacacatagcgacatgcaaatattgcagggcgccactcccctgtccctcacagccatcttcctgccagggcgcacgcgcgctgggtgttcccgcctagtgacactgggcccgcgattccttggagcgggttgatgacgtcagcgttcgaattccrcmdyyrcytctgacacaactgtgttcactagcaacctcaaacagacacc

SEQ ID NO: 1911 - DNA, 230 bp, Homo sapiens; identical to SEQ ID NO: 87

SEQ ID NO: 1912 - DNA, 239 bp, Artificial Sequence
  Description of Artificial Sequence: Synthetic polynucleotide
gggaaaaagtggtctcatacagaacttataagattcccaaatccaaagacatttcacgtttatggtgatttcccagaacacatagcgacatgcaaatattgcagggcgccactcccctgtccctcacagccatcttcctgccagggcgcacgcgcgctgggtgttcccgcctagtgacactgggcccgcgattccttggagcgggttgatgacgtcagcgttcgaattccgccgccacc

SEQ ID NO: 1913 - DNA, 280 bp, Artificial Sequence
  Description of Artificial Sequence: Synthetic polynucleotide
gggaaaaagtggtctcatacagaacttataagattcccaaatccaaagacatttcacgtttatggtgatttcccagaacacatagcgacatgcaaatattgcagggcgccactcccctgtccctcacagccatcttcctgccagggcgcacgcgcgctgggtgttcccgcctagtgacactgggcccgcgattccttggagcgggttgatgacgtcagcgttcgaattccacatttgcttctgacacaactgtgttcactagcaacctcaaacagacacc

SEQ ID NO: 1914 - DNA, 236 bp, Artificial Sequence
  Description of Artificial Sequence: Synthetic polynucleotide
gggaaaaagtggtctcatacagaacttcgaagattcccaaatccaaagacatttcacgtttatggtgatttcccagaacacatagcgacatgcaaatattgcagggcgccactcccctgtccctcacagccatcttcctgccagggcgcacgcgcgctgggtgttcccgcctagtgacactgggcccgcgattccttggagcgggttgatgacgtcagcgttcgaattccgccacc

SEQ ID NO: 1915 - DNA, 225 bp, Artificial Sequence
  Description of Artificial Sequence: Synthetic polynucleotide
ttcaggatgtagaccggccgccactmkaaggctcgaaagaggaataaatttttcgtttagggtgatttcccacaaagcacagcgcgtaattgcatgcgctctaccccaggctcctgtgctagacaagaagcccgcgcatccgggcaagggatgatgacgtcgtccttcaagagcgrcmdyyrcytctgacacaactgtgttcactagcaacctcaaacagacacc

SEQ ID NO: 1916 - DNA, 175 bp, Mus musculus; identical to SEQ ID NO: 93

SEQ ID NO: 1917 - DNA, 184 bp, Artificial Sequence
  Description of Artificial Sequence: Synthetic polynucleotide
ttcaggatgtagaccggccgccactataaggctcgaaagaggaataaatttttcgtttagggtgatttcccacaaagcacagcgcgtaattgcatgcgctctaccccaggctcctgtgctagacaagaagcccgcgcatccgggcaagggatgatgacgtcgtccttcaagagcggccgccacc

SEQ ID NO: 1918 - DNA, 225 bp, Artificial Sequence
  Description of Artificial Sequence: Synthetic polynucleotide
ttcaggatgtagaccggccgccactataaggctcgaaagaggaataaatttttcgtttagggtgatttcccacaaagcacagcgcgtaattgcatgcgctctaccccaggctcctgtgctagacaagaagcccgcgcatccgggcaagggatgatgacgtcgtccttcaagagcgacatttgcttctgacacaactgtgttcactagcaacctcaaacagacacc

SEQ ID NO: 1919 - DNA, 181 bp, Artificial Sequence
  Description of Artificial Sequence: Synthetic polynucleotide
ttcaggatgtagaccggccgccactcgaaggctcgaaagaggaataaatttttcgtttagggtgatttcccacaaagcacagcgcgtaattgcatgcgctctaccccaggctcctgtgctagacaagaagcccgcgcatccgggcaagggatgatgacgtcgtccttcaagagcggccacc
